United States Patent Application Publication US 2026/0347839 A1, published November 5, 2026 (application 19/105,597).

The application's sequence listing, which the Patent Office published only in electronic form, follows.

SEQUENCE LISTING (2281 sequences)

SEQ ID NO: 1 - DNA, 343 bp, synthetic construct
  misc_feature 1..343: note = Synthetic
  source 1..343: mol_type = other DNA
ctgttacttttgctgtgatgctgtaatgccgggaacgcgtgcacacggtcacaccaacactaataggactgtcctgtctgctgtgtgctcaccacaccctttgggcatgagaagcccccactggggttttctaaggagaaaggaggcaaatgcttttccgtgtcaatcagtccaatcttgttttcactctcttgagcaaaggattctggaaccatctgtcacctaaactttaactctaatcttcttctgcttcctttgtctcttttcttcccttacctcgcccacccctcgtctgtgtccgcccacccctcccttcccctcgtctctaacccggtgctaacag

SEQ ID NO: 2 - DNA, 82 bp, synthetic construct
  misc_feature 1..82: note = Synthetic
  source 1..82: mol_type = other DNA
gtaggtgtgtctcgaccagcgtcccgcccgctcccgcccgtccctcctgccagcatgcagccccctgctgcacgcagccgct

SEQ ID NO: 3 - DNA, 326 bp, synthetic construct
  misc_feature 1..326: note = Synthetic
  source 1..326: mol_type = other DNA
ggaaaattccactccctttgttccaattaatcctctctggtttttattgtaaggtgtactttttctttgagtgtcctgtgtggtcctttttaaaaggaggaaatgtcattatgcttcacattcttaagcttctggcaggcagagactattaatttgtttgcttatttaggactaaagaagcttttgttttttttcttcatttctctcttctttctaacttgcttttgtagcttagtaaccaaaactcagcctcagacttgtctttaaattgttttcaaccaccttctgtgccctgagtacctatgcttcctctttcctttgtacag

SEQ ID NO: 4 - DNA, 42 bp, synthetic construct
  misc_feature 1..42: note = Synthetic
  source 1..42: mol_type = other DNA
gtgagacccctgtctctactcaaaatacaaaaaaattagccg

SEQ ID NO: 5 - DNA, 182 bp, synthetic construct
  misc_feature 1..182: note = Synthetic
  source 1..182: mol_type = other DNA
cctggatgtgaacttgactctgctacttagatggccctgtgaacttgaccttattacttgcattgttggtgataatttatctggaatgggcactgcatcccaaacttctcaaatggattaaacctgacttgatggtacatttcttggatccaagtgaagtcttttttttcttttcttgacag

SEQ ID NO: 6 - DNA, 194 bp, synthetic construct
  misc_feature 1..194: note = Synthetic
  source 1..194: mol_type = other DNA
gtatgtgccaccatacttggctaatttttgtatttttagtagagatggggtttcaccatgttggccaggctggtctcgaactcctggcgtcaagtgatcaacccgtctcggcctcccaaaatgctgggattacaggcatgagccactgcacccggccccaagtgaagtcttttaagtgaattactgacctggta

SEQ ID NO: 7 - DNA, 279 bp, synthetic construct
  misc_feature 1..279: note = Synthetic
  source 1..279: mol_type = other DNA
accagttttgccattttttgagttatgaaatcttatattatttgttcttgaaagcgactatatgcttttaattttctgaatgaaaccaattatttgctatttattatgattcatttttataaaggaaaatatgtcctgctaacttagcatattctatgcttgatatgttaaaatcttgggttgaaagttttctaaaaatatcctagtcaagtcctgggacattttcaagagtgacttcggatttggttctattgtgtgtctggtgttttgatttccaag

SEQ ID NO: 8 - DNA, 116 bp, synthetic construct
  misc_feature 1..116: note = Synthetic
  source 1..116: mol_type = other DNA
gtgagttgttaacgctaagcttttgtttgggcactgttggtgagcttagtctttaggtctcctaagagggacagtctatgggaatggatctatgtgtcttggagaagcatggcctt

SEQ ID NO: 9 - DNA, 184 bp, synthetic construct
  misc_feature 1..184: note = Synthetic
  source 1..184: mol_type = other DNA
tttttaaaccccgaacccagtatgtagttattgcttcatgatagctgctctgatgatgatgatgataattattctctttttgactcattggtgacttttgaggctgaatatttttgtcatccccagcaaggctgaattcacatgtttttatggtatataactttcttccccttttttgtaacag

SEQ ID NO: 10 - DNA, 283 bp, synthetic construct
  misc_feature 1..283: note = Synthetic
  source 1..283: mol_type = other DNA
gtaagtgtagacgcattgaattgctttagctctggagatgggtttgagtgtttgctctgtctccgtgatacagaacttagttagaatagttgctggaaattagttggtctagatctaaggatgctttgggctgggtttcatggcttgggctcttatatttgactgttactttttacacccttccttgtggaacactttgccaaggtactgattttgcaagataagatcttcagactcacgagtaccttgccgcttcagtgaactttgtgtgatcctttctgct

SEQ ID NO: 11 - DNA, 171 bp, synthetic construct
  misc_feature 1..171: note = Synthetic
  source 1..171: mol_type = other DNA
tcttttcctccttcctgcatggtttggcctgtccttgccaggtccatctggggtagggctgtcccagcccagtaacaagtccctgcctcccaagccggtacctgcaattccgctcctccctcctgcgttggccgttctgtgtgtgtgactcacctcctcttctgtttaaag

SEQ ID NO: 12 - DNA, 285 bp, synthetic construct
  misc_feature 1..285: note = Synthetic
  source 1..285: mol_type = other DNA
gtgagtcctttgcatggttccattaactgccctttgctgtgaccccttctgtcctgcccacctgggcagggcgccctctctctgggtacctttggagatacttgagtctccctccacctgttctgagagctgactgcccatagaggatgggaagagggcagggcaagtgccctggtggtaggcctcttacgtgagaagttcttgctgggagggaccctggaatccatcccatccagcctcttggcacagagactgcaggcaaccttttcaaggtcacactgctag

SEQ ID NO: 13 - DNA, 142 bp, synthetic construct
  misc_feature 1..142: note = Synthetic
  source 1..142: mol_type = other DNA
aaatcaagatttgggatgtaattcacctctcacttttgtcttcaattccttttaacctctctgtacgtgttctctgtgttcttctgtctggactgtctggctcccggtgccatctctgtgtaacgtgtatccattaacacag

SEQ ID NO: 14 - DNA, 85 bp, synthetic construct
  misc_feature 1..85: note = Synthetic
  source 1..85: mol_type = other DNA
gtaagatgagtctctttgaaccatgggcatattaactaaacacgtgggcaatgtcagctttactggtgtcttttaacattgtctt

SEQ ID NO: 15 - DNA, 243 bp, synthetic construct
  misc_feature 1..243: note = Synthetic
  source 1..243: mol_type = other DNA
gagcctcctgcccctcaccaggccctgttagcatcacctcgggcacctggccacagcaggggccagtcagggcaccccgggatagcacgcccaggccctgtgcaaggcctctggcacttaggagaggcttttgcccctttgtcctctgagcagaagggttggcaaagagggaaggggacaggccagttctgcacctggcctttctccagaatgaaggcctccacctcccgtccgtccccacag

SEQ ID NO: 16 - DNA, 212 bp, synthetic construct
  misc_feature 1..212: note = Synthetic
  source 1..212: mol_type = other DNA
gtacgtgcagtgagtgctgcggaggggcgcagaggcccgcgccctggctggccctgtgcatgcgccttgcgccctgctcccaggtgccactaacccgtaatctggctctgtgtgcagtgctgcccggcagggctgtcgtgtgcgtgttgggtgggaaggcggaggcggcgcggggcgggctggcctctgagcatctggctgcatttagcacg

SEQ ID NO: 17 - DNA, 284 bp, synthetic construct
  misc_feature 1..284: note = Synthetic
  source 1..284: mol_type = other DNA
tttctcagccagtaccccagcctgtcctttaactctttcctacattttccttagtgtctttcagacttggttcagggcgaacagtccatttgctgacctcggtttgttctgttgactcttgggggttggggctggaacccagcagagtgactgtcagactgatccatgagaaggctggcatagcttggtctgaagcagggcttcatagagaccgctgggcttgggagctctgtggaggctctggggtgggcctcttgttagccacaagtctgtttctcctccag

SEQ ID NO: 18 - DNA, 174 bp, synthetic construct
  misc_feature 1..174: note = Synthetic
  source 1..174: mol_type = other DNA
gtaagcgacagctgcttggggagcccagcccctgttctcagcttcctgctttagaagcggagcctggtgctcaccatatgctccctgcctcgcagtctttgttttggttcagggaatttggacgtctctggtgcttcggacgtctctggtgcttcaggtctaggttcctgtctc

SEQ ID NO: 19 - DNA, 153 bp, synthetic construct
  misc_feature 1..153: note = Synthetic
  source 1..153: mol_type = other DNA
gacttcatcacaaaagaagttatgtttccccctaccccatcctttacccagttccagtggagcttccctttggggcatacacacagtctctgatgcaagtgctgatgtgccggtggctggacggtgttcactgtgattcccctctactgctag

SEQ ID NO: 20 - DNA, 209 bp, synthetic construct
  misc_feature 1..209: note = Synthetic
  source 1..209: mol_type = other DNA
gtttgtaactgattggcattggcatgagggagcttggctggtttttagcagtgctgctgattgatgctcatgctccatgctttggcaaaaatctaactaacatgattgggaagaagctggagttttctggctgatgaaggtgttctgtattcttcattgaggaatgttccttttcaattatgaacaccccacccccaacacacacacac

SEQ ID NO: 21 - DNA, 150 bp, synthetic construct
  misc_feature 1..150: note = Synthetic
  source 1..150: mol_type = other DNA
aggtattttttgtttttgataatttagatatttaagattaataaacaataatatagttactacttttcactttgcatcttttgactaattacaatactaatttatttacttcctttcttcattttgctataatacatttggactgcacag

SEQ ID NO: 22 - DNA, 200 bp, synthetic construct
  misc_feature 1..200: note = Synthetic
  source 1..200: mol_type = other DNA
gtaaagtaccatttaacctttttttccaatcaatgtttatactgcctaactatattttacgtgtccattaattattttaaaagcactgcaatagttactttagattttaatatcaaattctaaaactaaccagccataatgtagtgaggtttttaaattgacactggtatcccaattttatttatacagacttttaggaa

SEQ ID NO: 23 - DNA, 75 bp, unidentified
  misc_feature 1..75: note = May be homo sapiens or mus musculus
  source 1..75: mol_type = genomic DNA
tgggcagacagaccaccgctccggccacaatgtccaccgcggcctccggcaccaccatggggctggtggaacaag

SEQ ID NO: 24 - DNA, 74 bp, unidentified
  misc_feature 1..74: note = May be homo sapiens or mus musculus
  source 1..74: mol_type = genomic DNA
tgggcagacagaccaccgctccggccacaagtccaccgcggcctccggcaccaccaggggctggtggaacaatg

SEQ ID NO: 25 - DNA, 132 bp, unidentified
  misc_feature 1..132: note = May be homo sapiens or mus musculus
  source 1..132: mol_type = genomic DNA
accatacagtcaatttaagaagtaggaatggctggccgggcgcggtggctcacgcctgtaatcccagcactttgggaggccaaggcgggcggatcacgaggtcaggagttcgagaccagcctgaccaacatg

SEQ ID NO: 26 - DNA, 131 bp, unidentified
  misc_feature 1..131: note = May be homo sapiens or mus musculus
  source 1..131: mol_type = genomic DNA
accatacagtcaatttaagaagtaggaaggctggccgggcgcggtggctcacgcctgtaatcccagcactttgggaggccaaggcgggcggatcacgaggtcaggagttcgagaccagcctgaccaacatg

SEQ ID NO: 27 - DNA, 118 bp, unidentified
  misc_feature 1..118: note = May be homo sapiens or mus musculus
  source 1..118: mol_type = genomic DNA
ggtcttactctgttgcccaggctggagtgcagtggcacaatcttggctcactgcaacctctgcctcccgggttcaagcaattctcctgcctcagcctcccgagtagctgggattacag

SEQ ID NO: 28 - DNA, 119 bp, unidentified
  misc_feature 1..119: note = May be homo sapiens or mus musculus
  source 1..119: mol_type = genomic DNA
ggtcttactctgttgcccaggctggagtgcagtggcacaatcttggctcactgcaacctctgcctcccgggttcaagcaattctcctgcctcagcctcccgagtagctgggattacatg

SEQ ID NO: 29 - DNA, 105 bp, unidentified
  misc_feature 1..105: note = May be homo sapiens or mus musculus
  source 1..105: mol_type = genomic DNA
gtggagtataagaaggatctggaaagtagtagaggtcacagtatcaactactgtgaaacacctcaattcaggaacgtgagcaagatctcaaaatttaccagtgat

SEQ ID NO: 30 - DNA, 105 bp, unidentified; identical to SEQ ID NO: 29
  misc_feature 1..105: note = May be homo sapiens or mus musculus
  source 1..105: mol_type = genomic DNA

SEQ ID NO: 31 - DNA, 33 bp, unidentified
  misc_feature 1..33: note = May be homo sapiens or mus musculus
  source 1..33: mol_type = genomic DNA
tgccagcagatgtagcatcacctgaaagcggca

SEQ ID NO: 32 - DNA, 33 bp, unidentified
  misc_feature 1..33: note = May be homo sapiens or mus musculus
  source 1..33: mol_type = genomic DNA
tgccagcagttgtagcatcacctgaaagcggca

SEQ ID NO: 33 - DNA, 42 bp, unidentified
  misc_feature 1..42: note = May be homo sapiens or mus musculus
  source 1..42: mol_type = genomic DNA
ctgcctacttcattcatcatagacagcagtttatctttccag

SEQ ID NO: 34 - DNA, 43 bp, synthetic construct
  misc_feature 1..43: note = Synthetic
  source 1..43: mol_type = other DNA
ctgcctacttcattcatcatagacagcagtttatctttccatg

SEQ ID NO: 35 - DNA, 264 bp, synthetic construct
  misc_feature 1..264: note = Synthetic
  source 1..264: mol_type = other DNA
tggatgcagcactccctccgggattgactgtggcagtggacgcagcaccccttcttctgtcagtactgttagtaccatttgcccaggtgacttgaaagttgcggctaagctggcccctaacattcctttggaaatggaacttcctggtgtgaagattgtacatgctcagtttaatacacctatgcagttgtactcagatgacaatattatggaaacactccagggtcaggtttcaacagccctaggggaaacacctttgatgag

SEQ ID NO: 36 - DNA, 261 bp, synthetic construct
  misc_feature 1..261: note = Synthetic
  source 1..261: mol_type = other DNA
tggattgcagcactccctccgggattgactgtggcagtggacgcagcaccccttcttctgtcagtactgttagtaccatttgcccaggtgacttgaaagttgcggctaagctggcccctaacattcctttggaaggaacttcctggtgtgaagattgtactgctcagtttaatacaccttgcagttgtactcagtgacaatattgtggaaacactccagggtcaggtttcaacagccctaggggaaacacctttgctgatg

SEQ ID NO: 37 - DNA, 45 bp, synthetic construct
  misc_feature 1..45: note = Synthetic
  source 1..45: mol_type = other DNA
aaagaaaagtaaactgttttcgcggctgcgcagaaagaagaacag

SEQ ID NO: 38 - DNA, 46 bp, synthetic construct
  misc_feature 1..46: note = Synthetic
  source 1..46: mol_type = other DNA
aaagaaaagtaaactgttttcgcggctgcgcagaaagaagaacatg

SEQ ID NO: 39 - DNA, 42 bp, synthetic construct
  misc_feature 1..42: note = Synthetic
  source 1..42: mol_type = other DNA
agtccgtgtatctgtcagctaaaggggcccttcctgccagag

SEQ ID NO: 40 - DNA, 43 bp, synthetic construct
  misc_feature 1..43: note = Synthetic
  source 1..43: mol_type = other DNA
agtccgtgtatctgtcagctaaaggggcccttcctgccagatg

SEQ ID NO: 41 - DNA, 120 bp, synthetic construct
  misc_feature 1..120: note = Synthetic
  source 1..120: mol_type = other DNA
gtggcttcccgataataagcctgtctgcctggtggtcatccccttggtggtcttatttgaagatcctctttcctctcatgtggtttcagacgaagctcctccacaaacactgggataaag

SEQ ID NO: 42 - DNA, 121 bp, synthetic construct
  misc_feature 1..121: note = Synthetic
  source 1..121: mol_type = other DNA
gtggcttcccgataataagcctgtctgcctggtggtcatccccttggtggtcttatttgaagatcctctttcctctcaagtggtttcagacgaagctcctccacaaacactgggataaatg

SEQ ID NO: 43 - DNA, 150 bp, synthetic construct
  misc_feature 1..150: note = Synthetic
  source 1..150: mol_type = other DNA
atcctttctctgctactgtagatgctgttgatgatgccattccaagcttaaatcctttcctcacaaaaagtagtggtgatgttcacctttccatttcttcagatgtatctacttttactactaggacacctactcatgaaatgtttgttg

SEQ ID NO: 44 - DNA, 148 bp, synthetic construct
  misc_feature 1..148: note = Synthetic
  source 1..148: mol_type = other DNA
atcctttctctgctactgtagagctgttgtgatccattccaagcttaaatcctttcctcacaaaaagtagtggtgagttcacctttccatttcttcagattgtatctacttttactactaggacacctactcattgaaagtttgtatg

SEQ ID NO: 45 - DNA, 4048 bp, synthetic construct
  misc_feature 1..4048: note = Synthetic
  source 1..4048: mol_type = other DNA
cctgcaggcagctgcgcgctcgctcgctcactgaggccgcccgggcaaagcccgggcgtcgggcgacctttggtcgcccggcctcagtgagcgagcgagcgcgcagagagggagtggccaactccatcactaggggttcctgcggccgcagccgtgttttagagctagaaatagcaagttaaaataaggctagtccgtagcgcgtgcgccaattctgcagacaaattctagaggtaccacccttcagattaaaaataactgaggtaagggcctgggtaggggaggtggtgtgagacgctcctgtctctcctctatctgcccatcggccctttggggaggaggaatgtgcccaaggactaaaaaaaggccatggagccagaggggcgagggcaacagacctttcatgggcaaaccttggggccctgctgtctagcatgccccactacgggtctaggctgcccatgtaaggaggcaaggcctggggacacccgagatgcctggttataattaacccagacatgtggctgcccccccccccccaacacctgctgcctctaaaaataaccctgtccctggtggatcccctgcatgcgaagatcttcgaacaaggctgtgggggactgagggcaggctgtaacaggcttgggggccagggcttatacgtgcctgggactcccaaagtattactgttccatgttcccggcgaagggccagctgtcccccgccagctagactcagcacttagtttaggaaccagtgagcaagtcagcccttggggcagcccatacaaggccatggggctgggcaagctgcacgcctgggtccggggtgggcacggtgcccgggcaacgagctgaaagctcatctgctctcaggggcccctccctggggacagcccctcctggctagtcacaccctgtaggctcctctatataacccaggggcacaggggctgccctcattctaccaccacctccacagcacagacagacactcaggagccagccagctagcagtggctatcatactggctattatcaggtaagtaatcactcagcatcttttcctgacaatttttttgtagttatgtgactttgttttgtaaatttataaaatactacttgcttctctctttatattactaaaaaataaaaataaaaaaatacaactgtctgaggcttaaattactcttgcattgtccctaagtataattttagttaattttaaaaagcttcaattgctgttacttttgctgtgatgctgtaatgccgggaacgcgtgcacacggtcacaccaacactaataggactgtcctgtctgctgtgtgctcaccacaccctttgggcatgagaagcccccactggggttttctaaggagaaaggaggcaaatgcttttccgtgtcaatcagtccaatcttgttttcactctcttgagcaaaggattctggaaccatctgtcacctaaactttaactctaatcttcttctgcttcctttgtctcttttcttcccttacctcgcccacccctcgtctgtgtccgcccacccctcccttcccctcgtctctaacccggtgctaacagtgggcagacagaccaccgctccggccacaagtccaccgcggcctccggcaccaccaggggctggtggaacaatggtaggtgtgtctcgaccagcgtcccgcccgctcccgcccgtccctcctgccagcatgcagccccctgctgcacgcagccgctactagtaggcagaccagcagacttttttttattgtgatatgggataacctaggcatactgcactgtacactctgacatatgaagtgctctagtcaagtttaactggtgtccacagaggacatggtttaactggaattcgtcaagcctctggttctaatttctcatttgcaggcttctgcatcaacttctaaatataattcacactccttggagaatgagtctataaagaggacgtctcgagatggagtgaatcgagatctcactgaggctgttcctcgacttccaggagaaacactaatcactgacaaagaagttatttacatatgtccttttaatggccccattaagggaagagtttacatcacaaattatcgtctttatttaagaagtttggaaacggattcttctctaatacttgatgttcctctgggtgtgatctcgagaattgaaaaaatgggaggcgcgacaagtagaggagaaaattcctatggtctagatattacttgtaaagacatgagaaacctcagatttgccttgaaacaggaaggccacagcagaagagatatgtttgagatcctcacgagatacgcgtttcccctggctcacagtctgccattatttgcatttttaaatgaagaaaagtttaacgtggatggatggacagtttacaatccagtggaagaatacaggaggcagggcttgcccaatcaccattggagaataacttttattaataagtgctatgagctctgtgacacttaccctgctcttttggtggttccgtatcgtgcctcagatgatgacctccggagagttgcaacttttaggtcccgaaatcgaattccagtgctgtcatggattcatccagaaaataagacggtcattgtgcgttgcagtcagcctcttgtcggtatgagtgggaaacgaaataaagatgatgagaaatatctcgatgttatcagggagactaataaacaaatttctaaactcaccatttatgatgcaagacccagcgtaaatgcagtggccaacaaggcaacaggaggaggatatgaaagtgatgatgcatatcataacgccgaacttttcttcttagacattcataatattcatgttatgcgggaatctttaaaaaaagtgaaggacattgtttatcctaatgtagaagaatctcattggttgtccagtttggagtctactcattggttagaacatatcaagctcgttttgacaggagccattcaagtagcagacaaagtttcttcagggaagagttcagtgcttgtgcattgcagtgacggatgggacaggactgctcagctgacatccttggccatgctgatgttggatagcttctataggagcattgaagggttcgaaatactggtacaaaaagaatggataagttttggacataaatttgcatctcgaataggtcatggtgataaaaaccacaccgatgctgaccgttctcctatttttctccagtttattgattgtgtgtggcaaatgtcaaaacagttccctacagcttttgaattcaatgaacaatttttgattataattttggatcatctgtatagttgccgatttggtactttcttattcaactgtgaatctgctcgagaaagacagaaggttacagaaaggactgtttctttatggtcactgataaacagtaataaagaaaaattcaaaaaccccttctatactaaagaaatcaatcgagttttatatccagttgccagtatgcgtcacttggaactctgggtgaattactacattagatggaaccccaggatcaagcaacaacagccgaatccagtggagcagcgttacatggagctcttagccttacgcgacgaatacataaagcggcttgaggaactgcagctcgccaactctgccaagctttctgatcccccaacttcaccttccagtccttcgcaaatgatgccccatgtgcaaactcacttctacccatacgacgtaccagattacgcttagcttaagatacattgatgagtttggacaaaccacaactagaatgcagtgaaaaaaatgctttatttgtgaaatttgtgatgctattgctttatttgtaaccattataagctgcaataaacaagttctgattttgtagttaacacgtgcgaccgagcggccgcaggaacccctagtgatggagttggccactccctctctgcgcgctcgctcgctcactgaggccgggcgaccaaaggtcgcccgacgcccgggctttgcccgggcggcctcagtgagcgagcgagcgcgcagctgcctgcagg

SEQ ID NO: 46 - DNA, 4048 bp, synthetic construct
  misc_feature 1..4048: note = Synthetic
  source 1..4048: mol_type = other DNA
cctgcaggcagctgcgcgctcgctcgctcactgaggccgcccgggcaaagcccgggcgtcgggcgacctttggtcgcccggcctcagtgagcgagcgagcgcgcagagagggagtggccaactccatcactaggggttcctgcggccgcagccgtgttttagagctagaaatagcaagttaaaataaggctagtccgtagcgcgtgcgccaattctgcagacaaattctagaggtaccacccttcagattaaaaataactgaggtaagggcctgggtaggggaggtggtgtgagacgctcctgtctctcctctatctgcccatcggccctttggggaggaggaatgtgcccaaggactaaaaaaaggccatggagccagaggggcgagggcaacagacctttcatgggcaaaccttggggccctgctgtctagcatgccccactacgggtctaggctgcccatgtaaggaggcaaggcctggggacacccgagatgcctggttataattaacccagacatgtggctgcccccccccccccaacacctgctgcctctaaaaataaccctgtccctggtggatcccctgcatgcgaagatcttcgaacaaggctgtgggggactgagggcaggctgtaacaggcttgggggccagggcttatacgtgcctgggactcccaaagtattactgttccatgttcccggcgaagggccagctgtcccccgccagctagactcagcacttagtttaggaaccagtgagcaagtcagcccttggggcagcccatacaaggccatggggctgggcaagctgcacgcctgggtccggggtgggcacggtgcccgggcaacgagctgaaagctcatctgctctcaggggcccctccctggggacagcccctcctggctagtcacaccctgtaggctcctctatataacccaggggcacaggggctgccctcattctaccaccacctccacagcacagacagacactcaggagccagccagctagcagtggctatcatactggctattatcaggtaagtaatcactcagcatcttttcctgacaatttttttgtagttatgtgactttgttttgtaaatttataaaatactacttgcttctctctttatattactaaaaaataaaaataaaaaaatacaactgtctgaggcttaaattactcttgcattgtccctaagtataattttagttaattttaaaaagcttcaattgggaaaattccactccctttgttccaattaatcctctctggtttttattgtaaggtgtactttttctttgagtgtcctgtgtggtcctttttaaaaggaggaaatgtcattatgcttcacattcttaagcttctggcaggcagagactattaatttgtttgcttatttaggactaaagaagcttttgttttttttcttcatttctctcttctttctaacttgcttttgtagcttagtaaccaaaactcagcctcagacttgtctttaaattgttttcaaccaccttctgtgccctgagtacctatgcttcctctttcctttgtacagaccatacagtcaatttaagaagtaggaaggctggccgggcgcggtggctcacgcctgtaatcccagcactttgggaggccaaggcgggcggatcacgaggtcaggagttcgagaccagcctgaccaacatggtgagacccctgtctctactcaaaatacaaaaaaattagccgactagtaggcagaccagcagacttttttttattgtgatatgggataacctaggcatactgcactgtacactctgacatatgaagtgctctagtcaagtttaactggtgtccacagaggacatggtttaactggaattcgtcaagcctctggttctaatttctcatttgcaggcttctgcatcaacttctaaatataattcacactccttggagaatgagtctataaagaggacgtctcgagatggagtgaatcgagatctcactgaggctgttcctcgacttccaggagaaacactaatcactgacaaagaagttatttacatatgtccttttaatggccccattaagggaagagtttacatcacaaattatcgtctttatttaagaagtttggaaacggattcttctctaatacttgatgttcctctgggtgtgatctcgagaattgaaaaaatgggaggcgcgacaagtagaggagaaaattcctatggtctagatattacttgtaaagacatgagaaaccttagattcgcgttgaaacaggaaggccacagcagaagagatatgtttgagatcctcacgagatacgcgtttcccctggctcacagtctgccattatttgcatttttaaatgaagaaaagtttaacgtggatggatggacagtttacaatccagtggaagaatacaggaggcagggcttgcccaatcaccattggagaataacttttattaataagtgctatgagctctgtgacacttaccctgctcttttggtggttccgtatcgtgcctcagatgatgacctccggagagttgcaacttttaggtcccgaaatcgaattccagtgctgtcatggattcatccagaaaataagacggtcattgtgcgttgcagtcagcctcttgtcggtatgagtgggaaacgaaataaagatgatgagaaatatctcgatgttatcagggagactaataaacaaatttctaaactcaccatttatgatgcaagacccagcgtaaatgcagtggccaacaaggcaacaggaggaggatatgaaagtgatgatgcatatcataacgccgaacttttcttcttagacattcataatattcatgttatgcgggaatctttaaaaaaagtgaaggacattgtttatcctaatgtagaagaatctcattggttgtccagtttggagtctactcattggttagaacatatcaagctcgttttgacaggagccattcaagtagcagacaaagtttcttcagggaagagttcagtgcttgtgcattgcagtgacggatgggacaggactgctcagctgacatccttggccatgctgatgttggatagcttctataggagcattgaagggttcgaaatactggtacaaaaagaatggataagttttggacataaatttgcatctcgaataggtcatggtgataaaaaccacaccgatgctgaccgttctcctatttttctccagtttattgattgtgtgtggcaaatgtcaaaacagttccctacagcttttgaattcaatgaacaatttttgattataattttggatcatctgtatagttgccgatttggtactttcttattcaactgtgaatctgctcgagaaagacagaaggttacagaaaggactgtttctttatggtcactgataaacagtaataaagaaaaattcaaaaaccccttctatactaaagaaatcaatcgagttttatatccagttgccagtatgcgtcacttggaactctgggtgaattactacattagatggaaccccaggatcaagcaacaacagccgaatccagtggagcagcgttacatggagctcttagccttacgcgacgaatacataaagcggcttgaggaactgcagctcgccaactctgccaagctttctgatcccccaacttcaccttccagtccttcgcaaatgatgccccatgtgcaaactcacttctacccatacgacgtaccagattacgcttagcttaagatacattgatgagtttggacaaaccacaactagaatgcagtgaaaaaaatgctttatttgtgaaatttgtgatgctattgctttatttgtaaccattataagctgcaataaacaagttctgattttgtagttaacacgtgcgaccgagcggccgcaggaacccctagtgatggagttggccactccctctctgcgcgctcgctcgctcactgaggccgggcgaccaaaggtcgcccgacgcccgggctttgcccgggcggcctcagtgagcgagcgagcgcgcagctgcctgcagg

SEQ ID NO: 47 - DNA, 4044 bp, synthetic construct
  misc_feature 1..4044: note = Synthetic
  source 1..4044: mol_type = other DNA
cctgcaggcagctgcgcgctcgctcgctcactgaggccgcccgggcaaagcccgggcgtcgggcgacctttggtcgcccggcctcagtgagcgagcgagcgcgcagagagggagtggccaactccatcactaggggttcctgcggccgcagccgtgttttagagctagaaatagcaagttaaaataaggctagtccgtagcgcgtgcgccaattctgcagacaaattctagaggtaccacccttcagattaaaaataactgaggtaagggcctgggtaggggaggtggtgtgagacgctcctgtctctcctctatctgcccatcggccctttggggaggaggaatgtgcccaaggactaaaaaaaggccatggagccagaggggcgagggcaacagacctttcatgggcaaaccttggggccctgctgtctagcatgccccactacgggtctaggctgcccatgtaaggaggcaaggcctggggacacccgagatgcctggttataattaacccagacatgtggctgcccccccccccccaacacctgctgcctctaaaaataaccctgtccctggtggatcccctgcatgcgaagatcttcgaacaaggctgtgggggactgagggcaggctgtaacaggcttgggggccagggcttatacgtgcctgggactcccaaagtattactgttccatgttcccggcgaagggccagctgtcccccgccagctagactcagcacttagtttaggaaccagtgagcaagtcagcccttggggcagcccatacaaggccatggggctgggcaagctgcacgcctgggtccggggtgggcacggtgcccgggcaacgagctgaaagctcatctgctctcaggggcccctccctggggacagcccctcctggctagtcacaccctgtaggctcctctatataacccaggggcacaggggctgccctcattctaccaccacctccacagcacagacagacactcaggagccagccagctagcagtggctatcatactggctattatcaggtaagtaatcactcagcatcttttcctgacaatttttttgtagttatgtgactttgttttgtaaatttataaaatactacttgcttctctctttatattactaaaaaataaaaataaaaaaatacaactgtctgaggcttaaattactcttgcattgtccctaagtataattttagttaattttaaaaagcttcaattgcctggatgtgaacttgactctgctacttagatggccctgtgaacttgaccttattacttgcattgttggtgataatttatctggaatgggcactgcatcccaaacttctcaaatggattaaacctgacttgatggtacatttcttggatccaagtgaagtcttttttttcttttcttgacagggtcttactctgttgcccaggctggagtgcagtggcacaatcttggctcactgcaacctctgcctcccgggttcaagcaattctcctgcctcagcctcccgagtagctgggattacatggtatgtgccaccatacttggctaatttttgtatttttagtagagatggggtttcaccatgttggccaggctggtctcgaactcctggcgtcaagtgatcaacccgtctcggcctcccaaaatgctgggattacaggcatgagccactgcacccggccccaagtgaagtcttttaagtgaattactgacctggtaactagtaggcagaccagcagacttttttttattgtgatatgggataacctaggcatactgcactgtacactctgacatatgaagtgctctagtcaagtttaactggtgtccacagaggacatggtttaactggaattcgtcaagcctctggttctaatttctcatttgcaggcttctgcatcaacttctaaatataattcacactccttggagaatgagtctataaagaggacgtctcgagatggagtgaatcgagatctcactgaggctgttcctcgacttccaggagaaacactaatcactgacaaagaagttatttacatatgtccttttaatggccccattaagggaagagtttacatcacaaattatcgtctttatttaagaagtttggaaacggattcttctctaatacttgatgttcctctgggtgtgatctcgagaattgaaaaaatgggaggcgcgacaagtagaggagaaaattcctatggtctagatattacttgtaaagacatgagaaacctaagattcgccttgaaacaggaaggccacagcagaagagatatgtttgagatcctcacgagatacgcgtttcccctggctcacagtctgccattatttgcatttttaaatgaagaaaagtttaacgtggatggatggacagtttacaatccagtggaagaatacaggaggcagggcttgcccaatcaccattggagaataacttttattaataagtgctatgagctctgtgacacttaccctgctcttttggtggttccgtatcgtgcctcagatgatgacctccggagagttgcaacttttaggtcccgaaatcgaattccagtgctgtcatggattcatccagaaaataagacggtcattgtgcgttgcagtcagcctcttgtcggtatgagtgggaaacgaaataaagatgatgagaaatatctcgatgttatcagggagactaataaacaaatttctaaactcaccatttatgatgcaagacccagcgtaaatgcagtggccaacaaggcaacaggaggaggatatgaaagtgatgatgcatatcataacgccgaacttttcttcttagacattcataatattcatgttatgcgggaatctttaaaaaaagtgaaggacattgtttatcctaatgtagaagaatctcattggttgtccagtttggagtctactcattggttagaacatatcaagctcgttttgacaggagccattcaagtagcagacaaagtttcttcagggaagagttcagtgcttgtgcattgcagtgacggatgggacaggactgctcagctgacatccttggccatgctgatgttggatagcttctataggagcattgaagggttcgaaatactggtacaaaaagaatggataagttttggacataaatttgcatctcgaataggtcatggtgataaaaaccacaccgatgctgaccgttctcctatttttctccagtttattgattgtgtgtggcaaatgtcaaaacagttccctacagcttttgaattcaatgaacaatttttgattataattttggatcatctgtatagttgccgatttggtactttcttattcaactgtgaatctgctcgagaaagacagaaggttacagaaaggactgtttctttatggtcactgataaacagtaataaagaaaaattcaaaaaccccttctatactaaagaaatcaatcgagttttatatccagttgccagtatgcgtcacttggaactctgggtgaattactacattagatggaaccccaggatcaagcaacaacagccgaatccagtggagcagcgttacatggagctcttagccttacgcgacgaatacataaagcggcttgaggaactgcagctcgccaactctgccaagctttctgatcccccaacttcaccttccagtccttcgcaaatgatgccccatgtgcaaactcacttctacccatacgacgtaccagattacgcttagcttaagatacattgatgagtttggacaaaccacaactagaatgcagtgaaaaaaatgctttatttgtgaaatttgtgatgctattgctttatttgtaaccattataagctgcaataaacaagttctgattttgtagttaacacgtgcgaccgagcggccgcaggaacccctagtgatggagttggccactccctctctgcgcgctcgctcgctcactgaggccgggcgaccaaaggtcgcccgacgcccgggctttgcccgggcggcctcagtgagcgagcgagcgcgcagctgcctgcagg

SEQ ID NO: 48 - DNA, 3480 bp, synthetic construct
  misc_feature 1..3480: note = Synthetic
  source 1..3480: mol_type = other DNA
cctgcaggcagctgcgcgctcgctcgctcactgaggccgcccgggcaaagcccgggcgtcgggcgacctttggtcgcccggcctcagtgagcgagcgagcgcgcagagagggagtggccaactccatcactaggggttcctgcggccgcagccgtgttttagagctagaaatagcaagttaaaataaggctagtccgtagcgcgtgcgccaattctgcagacaaattctagaggtaccacccttcagattaaaaataactgaggtaagggcctgggtaggggaggtggtgtgagacgctcctgtctctcctctatctgcccatcggccctttggggaggaggaatgtgcccaaggactaaaaaaaggccatggagccagaggggcgagggcaacagacctttcatgggcaaaccttggggccctgctgtctagcatgccccactacgggtctaggctgcccatgtaaggaggcaaggcctggggacacccgagatgcctggttataattaacccagacatgtggctgcccccccccccccaacacctgctgcctctaaaaataaccctgtccctggtggatcccctgcatgcgaagatcttcgaacaaggctgtgggggactgagggcaggctgtaacaggcttgggggccagggcttatacgtgcctgggactcccaaagtattactgttccatgttcccggcgaagggccagctgtcccccgccagctagactcagcacttagtttaggaaccagtgagcaagtcagcccttggggcagcccatacaaggccatggggctgggcaagctgcacgcctgggtccggggtgggcacggtgcccgggcaacgagctgaaagctcatctgctctcaggggcccctccctggggacagcccctcctggctagtcacaccctgtaggctcctctatataacccaggggcacaggggctgccctcattctaccaccacctccacagcacagacagacactcaggagccagccagctagcagtggctatcatactggctattatcaggtaagtaatcactcagcatcttttcctgacaatttttttgtagttatgtgactttgttttgtaaatttataaaatactacttgcttctctctttatattactaaaaaataaaaataaaaaaatacaactgtctgaggcttaaattactcttgcattgtccctaagtataattttagttaattttaaaaagcttcaattgaccagttttgccattttttgagttatgaaatcttatattatttgttcttgaaagcgactatatgcttttaattttctgaatgaaaccaattatttgctatttattatgattcatttttataaaggaaaatatgtcctgctaacttagcatattctatgcttgatatgttaaaatcttgggttgaaagttttctaaaaatatcctagtcaagtcctgggacattttcaagagtgacttcggatttggttctattgtgtgtctggtgttttgatttccaaggtggagtataagaaggatctggaaagtagtagaggtcacagtatcaactactgtgaaacacctcaattcaggaacgtgagcaagatctcaaaatttaccagtgatgtgagttgttaacgctaagcttttgtttgggcactgttggtgagcttagtctttaggtctcctaagagggacagtctatgggaatggatctatgtgtcttggagaagcatggccttactagtaggcagaccagcagacttttttttattgtgatatgggataacctaggcatactgcactgtacactctgacatatgaagtgctctagtcaagtttaactggtgtccacagaggacatggtttaactggaattcgtcaagcctctggttctaatttctcatttgcagggcttctgcatcaacttctaaatataattcacactccttggagaatgagtctataaagaggacgtctcgagatggagtgaatcgagatctcactgaggctgttcctcgacttccaggagaaacactaatcactgacaaagaagttatttacatatgtccttttaatggccccattaagggaagagtttacatcacaaattatcgtctttatttaagaagtttggaaacggattcttctctaatacttgatgttcctctgggtgtgatctcgagaattgaaaaaatgggaggcgcgacaagtagaggagaaaattcctatggtctagatattacttgtaaagacatgagaaacctgagatttgcgttgaaacaggaaggccacagcagaagagatatgtttgagatcctcacgagatacgcgtttcccctggctcacagtctgccattatttgcatttttaaatgaagaaaagtttaacgtggatggatggacagtttacaatccagtggaagaatacaggaggcagggcttgcccaatcaccattggagaataacttttattaataagtgctatgagctctgtgacacttaccctgctcttttggtggttccgtatcgtgcctcagatgatgacctccggagagttgcaacttttaggtcccgaaatcgaattccagtgctgtcatggattcatccagaaaataagacggtcattgtgcgttgcagtcagcctcttgtcggtatgagtgggaaacgaaataaagatgatgagaaatatctcgatgttatcagggagactaataaacaaatttctaaactcaccatttatgatgcaagacccagcgtaaatgcagtggccaacaaggcaacaggaggaggatatgaaagtgatgatgcatatcataacgccgaacttttcttcttagacattcataatattcatgttatgcgggaatctttaaaaaaagtgaaggacattgtttatcctaatgtagaagaatctcattggttgtccagtttggagtctactcattggttagaacatatcaagctcgttttgacaggagccattcaagtagcagacaaagtttcttcagggaagagttcagtgcttgtgcattgcagtgacggatgggacaggactgctcagctgacatccttggccatgctgatgttggatagcttctataggagcattgaagggttcgaaatactggtacaaaaagaatggataagttttggacataaatttgcatctcgaataggtcatggtgataaaaaccacaccgatgctgaccgttctcctatttttctccagtttattgattgtgtgtggcaaatgtcaaaacagttccctacagcttttgaattcaatgaacaatttttgattataattttggatcatctgtatagttgccgatttggtactttcttattcaactgtgaatctgctcgagaaagacagaaggttacagaaaggactgtttctttatggtcactgataaacagtaataaagaaaaattcaaaaaccccttctatactaaagaaatcaatcgagttttatatcc

SEQ ID NO: 49 - DNA, 4051 bp, synthetic construct
  misc_feature 1..4051: note = Synthetic
  source 1..4051: mol_type = other DNA
cctgcaggcagctgcgcgctcgctcgctcactgaggccgcccgggcaaagcccgggcgtcgggcgacctttggtcgcccggcctcagtgagcgagcgagcgcgcagagagggagtggccaactccatcactaggggttcctgcggccgcagccgtgttttagagctagaaatagcaagttaaaataaggctagtccgtagcgcgtgcgccaattctgcagacaaattctagaggtaccacccttcagattaaaaataactgaggtaagggcctgggtaggggaggtggtgtgagacgctcctgtctctcctctatctgcccatcggccctttggggaggaggaatgtgcccaaggactaaaaaaaggccatggagccagaggggcgagggcaacagacctttcatgggcaaaccttggggccctgctgtctagcatgccccactacgggtctaggctgcccatgtaaggaggcaaggcctggggacacccgagatgcctggttataattaacccagacatgtggctgcccccccccccccaacacctgctgcctctaaaaataaccctgtccctggtggatcccctgcatgcgaagatcttcgaacaaggctgtgggggactgagggcaggctgtaacaggcttgggggccagggcttatacgtgcctgggactcccaaagtattactgttccatgttcccggcgaagggccagctgtcccccgccagctagactcagcacttagtttaggaaccagtgagcaagtcagcccttggggcagcccatacaaggccatggggctgggcaagctgcacgcctgggtccggggtgggcacggtgcccgggcaacgagctgaaagctcatctgctctcaggggcccctccctggggacagcccctcctggctagtcacaccctgtaggctcctctatataacccaggggcacaggggctgccctcattctaccaccacctccacagcacagacagacactcaggagccagccagctagcagtggctatcatactggctattatcaggtaagtaatcactcagcatcttttcctgacaatttttttgtagttatgtgactttgttttgtaaatttataaaatactacttgcttctctctttatattactaaaaaataaaaataaaaaaatacaactgtctgaggcttaaattactcttgcattgtccctaagtataattttagttaattttaaaaagcttcaattgtttttaaaccccgaacccagtatgtagttattgcttcatgatagctgctctgatgatgatgatgataattattctctttttgactcattggtgacttttgaggctgaatatttttgtcatccccagcaaggctgaattcacatgtttttatggtatataactttcttccccttttttgtaacagtgccagcagttgtagcatcacctgaaagcggcagtaagtgtagacgcattgaattgctttagctctggagatgggtttgagtgtttgctctgtctccgtgatacagaacttagttagaatagttgctggaaattagttggtctagatctaaggatgctttgggctgggtttcatggcttgggctcttatatttgactgttactttttacacccttccttgtggaacactttgccaaggtactgattttgcaagataagatcttcagactcacgagtaccttgccgcttcagtgaactttgtgtgatcctttctgctactagtaggcagaccagcagacttttttttattgtgatatgggataacctaggcatactgcactgtacactctgacatatgaagtgctctagtcaagtttaactggtgtccacagaggacatggtttaactggaattcgtcaagcctctggttctaatttctcatttgcagtggcttctgcatcaacttctaaatataattcacactccttggagaatgagtctataaagaggacgtctcgagatggagtgaatcgagatctcactgaggctgttcctcgacttccaggagaaacactaatcactgacaaagaagttatttacatatgtccttttaatggccccattaagggaagagtttacatcacaaattatcgtctttatttaagaagtttggaaacggattcttctctaatacttgatgttcctctgggtgtgatctcgagaattgaaaaaatgggaggcgcgacaagtagaggagaaaattcctatggtctagatattacttgtaaagacatgagaaatcttagattcgcgttgaaacaggaaggccacagcagaagagatatgtttgagatcctcacgagatacgcgtttcccctggctcacagtctgccattatttgcatttttaaatgaagaaaagtttaacgtggatggatggacagtttacaatccagtggaagaatacaggaggcagggcttgcccaatcaccattggagaataacttttattaataagtgctatgagctctgtgacacttaccctgctcttttggtggttccgtatcgtgcctcagatgatgacctccggagagttgcaacttttaggtcccgaaatcgaattccagtgctgtcatggattcatccagaaaataagacggtcattgtgcgttgcagtcagcctcttgtcggtatgagtgggaaacgaaataaagatgatgagaaatatctcgatgttatcagggagactaataaacaaatttctaaactcaccatttatgatgcaagacccagcgtaaatgcagtggccaacaaggcaacaggaggaggatatgaaagtgatgatgcatatcataacgccgaacttttcttcttagacattcataatattcatgttatgcgggaatctttaaaaaaagtgaaggacattgtttatcctaatgtagaagaatctcattggttgtccagtttggagtctactcattggttagaacatatcaagctcgttttgacaggagccattcaagtagcagacaaagtttcttcagggaagagttcagtgcttgtgcattgcagtgacggatgggacaggactgctcagctgacatccttggccatgctgatgttggatagcttctataggagcattgaagggttcgaaatactggtacaaaaagaatggataagttttggacataaatttgcatctcgaataggtcatggtgataaaaaccacaccgatgctgaccgttctcctatttttctccagtttattgattgtgtgtggcaaatgtcaaaacagttccctacagcttttgaattcaatgaacaatttttgattataattttggatcatctgtatagttgccgatttggtactttcttattcaactgtgaatctgctcgagaaagacagaaggttacagaaaggactgtttctttatggtcactgataaacagtaataaagaaaaattcaaaaaccccttctatactaaagaaatcaatcgagttttatatccagttgccagtatgcgtcacttggaactctgggtgaattactacattagatggaaccccaggatcaagcaacaacagccgaatccagtggagcagcgttacatggagctcttagccttacgcgacgaatacataaagcggcttgaggaactgcagctcgccaactctgccaagctttctgatcccccaacttcaccttccagtccttcgcaaatgatgccccatgtgcaaactcacttctacccatacgacgtaccagattacgcttagcttaagatacattgatgagtttggacaaaccacaactagaatgcagtgaaaaaaatgctttatttgtgaaatttgtgatgctattgctttatttgtaaccattataagctgcaataaacaagttctgattttgtagttaacacgtgcgaccgagcggccgcaggaacccctagtgatggagttggccactccctctctgcgcgctcgctcgctcactgaggccgggcgaccaaaggtcgcccgacgcccgggctttgcccgggcggcctcagtgagcgagcgagcgcgcagctgcctgcagg

SEQ ID NO: 50 - DNA, 4048 bp, synthetic construct
  misc_feature 1..4048: note = Synthetic
  source 1..4048: mol_type = other DNA
cctgcaggcagctgcgcgctcgctcgctcactgaggccgcccgggcaaagcccgggcgtcgggcgacctttggtcgcccggcctcagtgagcgagcgagcgcgcagagagggagtggccaactccatcactaggggttcctgcggccgcagccgtgttttagagctagaaatagcaagttaaaataaggctagtccgtagcgcgtgcgccaattctgcagacaaattctagaggtaccacccttcagattaaaaataactgaggtaagggcctgggtaggggaggtggtgtgagacgctcctgtctctcctctatctgcccatcggccctttggggaggaggaatgtgcccaaggactaaaaaaaggccatggagccagaggggcgagggcaacagacctttcatgggcaaaccttggggccctgctgtctagcatgccccactacgggtctaggctgcccatgtaaggaggcaaggcctggggacacccgagatgcctggttataattaacccagacatgtggctgcccccccccccccaacacctgctgcctctaaaaataaccctgtccctggtggatcccctgcatgcgaagatcttcgaacaaggctgtgggggactgagggcaggctgtaacaggcttgggggccagggcttatacgtgcctgggactcccaaagtattactgttccatgttcccggcgaagggccagctgtcccccgccagctagactcagcacttagtttaggaaccagtgagcaagtcagcccttggggcagcccatacaaggccatggggctgggcaagctgcacgcctgggtccggggtgggcacggtgcccgggcaacgagctgaaagctcatctgctctcaggggcccctccctggggacagcccctcctggctagtcacaccctgtaggctcctctatataacccaggggcacaggggctgccctcattctaccaccacctccacagcacagacagacactcaggagccagccagctagcagtggctatcatactggctattatcaggtaagtaatcactcagcatcttttcctgacaatttttttgtagttatgtgactttgttttgtaaatttataaaatactacttgcttctctctttatattactaaaaaataaaaataaaaaaatacaactgtctgaggcttaaattactcttgcattgtccctaagtataattttagttaattttaaaaagcttcaattgtcttttcctccttcctgcatggtttggcctgtccttgccaggtccatctggggtagggctgtcccagcccagtaacaagtccctgcctcccaagccggtacctgcaattccgctcctccctcctgcgttggccgttctgtgtgtgtgactcacctcctcttctgtttaaagctgcctacttcattcatcatagacagcagtttatctttccatggtgagtcctttgcatggttccattaactgccctttgctgtgaccccttctgtcctgcccacctgggcagggcgccctctctctgggtacctttggagatacttgagtctccctccacctgttctgagagctgactgcccatagaggatgggaagagggcagggcaagtgccctggtggtaggcctcttacgtgagaagttcttgctgggagggaccctggaatccatcccatccagcctcttggcacagagactgcaggcaaccttttcaaggtcacactgctagactagtaggcagaccagcagacttttttttattgtgatatgggataacctaggcatactgcactgtacactctgacatatgaagtgctctagtcaagtttaactggtgtccacagaggacatggtttaactggaattcgtcaagcctctggttctaatttctcatttgcaggcttctgcatcaacttctaaatataattcacactccttggagaatgagtctataaagaggacgtctcgagatggagtgaatcgagatctcactgaggctgttcctcgacttccaggagaaacactaatcactgacaaagaagttatttacatatgtccttttaatggccccattaagggaagagtttacatcacaaattatcgtctttatttaagaagtttggaaacggattcttctctaatacttgatgttcctctgggtgtgatctcgagaattgaaaaaatgggaggcgcgacaagtagaggagaaaattcctatggtctagatattacttgtaaagacatgagaaacctgagattcgccttgaaacaggaaggccacagcagaagagatatgtttgagatcctcacgagatacgcgtttcccctggctcacagtctgccattatttgcatttttaaatgaagaaaagtttaacgtggatggatggacagtttacaatccagtggaagaatacaggaggcagggcttgcccaatcaccattggagaataacttttattaataagtgctatgagctctgtgacacttaccctgctcttttggtggttccgtatcgtgcctcagatgatgacctccggagagttgcaacttttaggtcccgaaatcgaattccagtgctgtcatggattcatccagaaaataagacggtcattgtgcgttgcagtcagcctcttgtcggtatgagtgggaaacgaaataaagatgatgagaaatatctcgatgttatcagggagactaataaacaaatttctaaactcaccatttatgatgcaagacccagcgtaaatgcagtggccaacaaggcaacaggaggaggatatgaaagtgatgatgcatatcataacgccgaacttttcttcttagacattcataatattcatgttatgcgggaatctttaaaaaaagtgaaggacattgtttatcctaatgtagaagaatctcattggttgtccagtttggagtctactcattggttagaacatatcaagctcgttttgacaggagccattcaagtagcagacaaagtttcttcagggaagagttcagtgcttgtgcattgcagtgacggatgggacaggactgctcagctgacatccttggccatgctgatgttggatagcttctataggagcattgaagggttcgaaatactggtacaaaaagaatggataagttttggacataaatttgcatctcgaataggtcatggtgataaaaaccacaccgatgctgaccgttctcctatttttctccagtttattgattgtgtgtggcaaatgtcaaaacagttccctacagcttttgaattcaatgaacaatttttgattataattttggatcatctgtatagttgccgatttggtactttcttattcaactgtgaatctgctcgagaaagacagaaggttacagaaaggactgtttctttatggtcactgataaacagtaataaagaaaaattcaaaaaccccttctatactaaagaaatcaatcgagttttatatccagttgccagtatgcgtcacttggaactctgggtgaattactacattagatggaaccccaggatcaagcaacaacagccgaatccagtggagcagcgttacatggagctcttagccttacgcgacgaatacataaagcggcttgaggaactgcagctcgccaactctgccaagctttctgatcccccaacttcaccttccagtccttcgcaaatgatgccccatgtgcaaactcacttctacccatacgacgtaccagattacgcttagcttaagatacattgatgagtttggacaaaccacaactagaatgcagtgaaaaaaatgctttatttgtgaaatttgtgatgctattgctttatttgtaaccattataagctgcaataaacaagttctgattttgtagttaacacgtgcgaccgagcggccgcaggaacccctagtgatggagttggccactccctctctgcgcgctcgctcgctcactgaggccgggcgaccaaaggtcgcccgacgcccgggctttgcccgggcggcctcagtgagcgagcgagcgcgcagctgcctgcagg

SEQ ID NO: 51 - DNA, 4037 bp, synthetic construct
  misc_feature 1..4037: note = Synthetic
  source 1..4037: mol_type = other DNA
cctgcaggcagctgcgcgctcgctcgctcactgaggccgcccgggcaaagcccgggcgtcgggcgacctttggtcgcccggcctcagtgagcgagcgagcgcgcagagagggagtggccaactccatcactaggggttcctgcggccgcagccgtgttttagagctagaaatagcaagttaaaataaggctagtccgtagcgcgtgcgccaattctgcagacaaattctagaggtaccacccttcagattaaaaataactgaggtaagggcctgggtaggggaggtggtgtgagacgctcctgtctctcctctatctgcccatcggccctttggggaggaggaatgtgcccaaggactaaaaaaaggccatggagccagaggggcgagggcaacagacctttcatgggcaaaccttggggccctgctgtctagcatgccccactacgggtctaggctgcccatgtaaggaggcaaggcctggggacacccgagatgcctggttataattaacccagacatgtggctgcccccccccccccaacacctgctgcctctaaaaataaccctgtccctggtggatcccctgcatgcgaagatcttcgaacaaggctgtgggggactgagggcaggctgtaacaggcttgggggccagggcttatacgtgcctgggactcccaaagtattactgttccatgttcccggcgaagggccagctgtcccccgccagctagactcagcacttagtttaggaaccagtgagcaagtcagcccttggggcagcccatacaaggccatggggctgggcaagctgcacgcctgggtccggggtgggcacggtgcccgggcaacgagctgaaagctcatctgctctcaggggcccctccctggggacagcccctcctggctagtcacaccctgtaggctcctctatataacccaggggcacaggggctgccctcattctaccaccacctccacagcacagacagacactcaggagccagccagctagcagtggctatcatactggctattatcaggtaagtaatcactcagcatcttttcctgacaatttttttgtagttatgtgactttgttttgtaaatttataaaatactacttgcttctctctttatattactaaaaaataaaaataaaaaaatacaactgtctgaggcttaaattactcttgcattgtccctaagtataattttagttaattttaaaaagcttcaattgaaatcaagatttgggatgtaattcacctctcacttttgtcttcaattccttttaacctctctgtacgtgttctctgtgttcttctgtctggactgtctggctcccggtgccatctctgtgtaacgtgtatccattaacacagtggattgcagcactccctccgggattgactgtggcagtggacgcagcaccccttcttctgtcagtactgttagtaccatttgcccaggtgacttgaaagttgcggctaagctggcccctaacattcctttggaaggaacttcctggtgtgaagattgtactgctcagtttaatacaccttgcagttgtactcagtgacaatattgtggaaacactccagggtcaggtttcaacagccctaggggaaacacctttgctgatggtaagatgagtctctttgaaccatgggcatattaactaaacacgtgggcaatgtcagctttactggtgtcttttaacattgtcttactagtaggcagaccagcagacttttttttattgtgatatgggataacctaggcatactgcactgtacactctgacatatgaagtgctctagtcaagtttaactggtgtccacagaggacatggtttaactggaattcgtcaagcctctggttctaatttctcatttgcaggcttctgcatcaacttctaaatataattcacactccttggagaatgagtctataaagaggacgtctcgagatggagtgaatcgagatctcactgaggctgttcctcgacttccaggagaaacactaatcactgacaaagaagttatttacatatgtccttttaatggccccattaagggaagagtttacatcacaaattatcgtctttatttaagaagtttggaaacggattcttctctaatacttgatgttcctctgggtgtgatctcgagaattgaaaaaatgggaggcgcgacaagtagaggagaaaattcctatggtctagatattacttgtaaagacatgagaaatctcagattcgccttgaaacaggaaggccacagcagaagagatatgtttgagatcctcacgagatacgcgtttcccctggctcacagtctgccattatttgcatttttaaatgaagaaaagtttaacgtggatggatggacagtttacaatccagtggaagaatacaggaggcagggcttgcccaatcaccattggagaataacttttattaataagtgctatgagctctgtgacacttaccctgctcttttggtggttccgtatcgtgcctcagatgatgacctccggagagttgcaacttttaggtcccgaaatcgaattccagtgctgtcatggattcatccagaaaataagacggtcattgtgcgttgcagtcagcctcttgtcggtatgagtgggaaacgaaataaagatgatgagaaatatctcgatgttatcagggagactaataaacaaatttctaaactcaccatttatgatgcaagacccagcgtaaatgcagtggccaacaaggcaacaggaggaggatatgaaagtgatgatgcatatcataacgccgaacttttcttcttagacattcataatattcatgttatgcgggaatctttaaaaaaagtgaaggacattgtttatcctaatgtagaagaatctcattggttgtccagtttggagtctactcattggttagaacatatcaagctcgttttgacaggagccattcaagtagcagacaaagtttcttcagggaagagttcagtgcttgtgcattgcagtgacggatgggacaggactgctcagctgacatccttggccatgctgatgttggatagcttctataggagcattgaagggttcgaaatactggtacaaaaagaatggataagttttggacataaatttgcatctcgaataggtcatggtgataaaaaccacaccgatgctgaccgttctcctatttttctccagtttattgattgtgtgtggcaaatgtcaaaacagttccctacagcttttgaattcaatgaacaatttttgattataattttggatcatctgtatagttgccgatttggtactttcttattcaactgtgaatctgctcgagaaagacagaaggttacagaaaggactgtttctttatggtcactgataaacagtaataaagaaaaattcaaaaaccccttctatactaaagaaatcaatcgagttttatatccagttgccagtatgcgtcacttggaactctgggtgaattactacattagatggaaccccaggatcaagcaacaacagccgaatccagtggagcagcgttacatggagctcttagccttacgcgacgaatacataaagcggcttgaggaactgcagctcgccaactctgccaagctttctgatcccccaacttcaccttccagtccttcgcaaatgatgccccatgtgcaaactcacttctacccatacgacgtaccagattacgcttagcttaagatacattgatgagtttggacaaaccacaactagaatgcagtgaaaaaaatgctttatttgtgaaatttgtgatgctattgctttatttgtaaccattataagctgcaataaacaagttctgattttgtagttaacacgtgcgaccgagcggccgcaggaacccctagtgatggagttggccactccctctctgcgcgctcgctcgctcactgaggccgggcgaccaaaggtcgcccgacgcccgggctttgcccgggcggcctcagtgagcgagcgagcgcgcagctgcctgcagg

SEQ ID NO: 52 - DNA, 4050 bp, synthetic construct
  misc_feature 1..4050: note = Synthetic
  source 1..4050: mol_type = other DNA
cctgcaggcagctgcgcgctcgctcgctcactgaggccgcccgggcaaagcccgggcgtcgggcgacctttggtcgcccggcctcagtgagcgagcgagcgcgcagagagggagtggccaactccatcactaggggttcctgcggccgcagccgtgttttagagctagaaatagcaagttaaaataaggctagtccgtagcgcgtgcgccaattctgcagacaaattctagaggtaccacccttcagattaaaaataactgaggtaagggcctgggtaggggaggtggtgtgagacgctcctgtctctcctctatctgcccatcggccctttggggaggaggaatgtgcccaaggactaaaaaaaggccatggagccagaggggcgagggcaacagacctttcatgggcaaaccttggggccctgctgtctagcatgccccactacgggtctaggctgcccatgtaaggaggcaaggcctggggacacccgagatgcctggttataattaacccagacatgtggctgcccccccccccccaacacctgctgcctctaaaaataaccctgtccctggtggatcccctgcatgcgaagatcttcgaacaaggctgtgggggactgagggcaggctgtaacaggcttgggggccagggcttatacgtgcctgggactcccaaagtattactgttccatgttcccggcgaagggccagctgtcccccgccagctagactcagcacttagtttaggaaccagtgagcaagtcagcccttggggcagcccatacaaggccatggggctgggcaagctgcacgcctgggtccggggtgggcacggtgcccgggcaacgagctgaaagctcatctgctctcaggggcccctccctggggacagcccctcctggctagtcacaccctgtaggctcctctatataacccaggggcacaggggctgccctcattctaccaccacctccacagcacagacagacactcaggagccagccagctagcagtggctatcatactggctattatcaggtaagtaatcactcagcatcttttcctgacaatttttttgtagttatgtgactttgttttgtaaatttataaaatactacttgcttctctctttatattactaaaaaataaaaataaaaaaatacaactgtctgaggcttaaattactcttgcattgtccctaagtataattttagttaattttaaaaagcttcaattggagcctcctgcccctcaccaggccctgttagcatcacctcgggcacctggccacagcaggggccagtcagggcaccccgggatagcacgcccaggccctgtgcaaggcctctggcacttaggagaggcttttgcccctttgtcctctgagcagaagggttggcaaagagggaaggggacaggccagttctgcacctggcctttctccagaatgaaggcctccacctcccgtccgtccccacagaaagaaaagtaaactgttttcgcggctgcgcagaaagaagaacatggtacgtgcagtgagtgctgcggaggggcgcagaggcccgcgccctggctggccctgtgcatgcgccttgcgccctgctcccaggtgccactaacccgtaatctggctctgtgtgcagtgctgcccggcagggctgtcgtgtgcgtgttgggtgggaaggcggaggcggcgcggggcgggctggcctctgagcatctggctgcatttagcacgactagtaggcagaccagcagacttttttttattgtgatatgggataacctaggcatactgcactgtacactctgacatatgaagtgctctagtcaagtttaactggtgtccacagaggacatggtttaactggaattcgtcaagcctctggttctaatttctcatttgcaggcttctgcatcaacttctaaatataattcacactccttggagaatgagtctataaagaggacgtctcgagatggagtgaatcgagatctcactgaggctgttcctcgacttccaggagaaacactaatcactgacaaagaagttatttacatatgtccttttaatggccccattaagggaagagtttacatcacaaattatcgtctttatttaagaagtttggaaacggattcttctctaatacttgatgttcctctgggtgtgatctcgagaattgaaaaaatgggaggcgcgacaagtagaggagaaaattcctatggtctagatattacttgtaaagacatgagaaaccttagatttgctttgaaacaggaaggccacagcagaagagatatgtttgagatcctcacgagatacgcgtttcccctggctcacagtctgccattatttgcatttttaaatgaagaaaagtttaacgtggatggatggacagtttacaatccagtggaagaatacaggaggcagggcttgcccaatcaccattggagaataacttttattaataagtgctatgagctctgtgacacttaccctgctcttttggtggttccgtatcgtgcctcagatgatgacctccggagagttgcaacttttaggtcccgaaatcgaattccagtgctgtcatggattcatccagaaaataagacggtcattgtgcgttgcagtcagcctcttgtcggtatgagtgggaaacgaaataaagatgatgagaaatatctcgatgttatcagggagactaataaacaaatttctaaactcaccatttatgatgcaagacccagcgtaaatgcagtggccaacaaggcaacaggaggaggatatgaaagtgatgatgcatatcataacgccgaacttttcttcttagacattcataatattcatgttatgcgggaatctttaaaaaaagtgaaggacattgtttatcctaatgtagaagaatctcattggttgtccagtttggagtctactcattggttagaacatatcaagctcgttttgacaggagccattcaagtagcagacaaagtttcttcagggaagagttcagtgcttgtgcattgcagtgacggatgggacaggactgctcagctgacatccttggccatgctgatgttggatagcttctataggagcattgaagggttcgaaatactggtacaaaaagaatggataagttttggacataaatttgcatctcgaataggtcatggtgataaaaaccacaccgatgctgaccgttctcctatttttctccagtttattgattgtgtgtggcaaatgtcaaaacagttccctacagcttttgaattcaatgaacaatttttgattataattttggatcatctgtatagttgccgatttggtactttcttattcaactgtgaatctgctcgagaaagacagaaggttacagaaaggactgtttctttatggtcactgataaacagtaataaagaaaaattcaaaaaccccttctatactaaagaaatcaatcgagttttatatccagttgccagtatgcgtcacttggaactctgggtgaattactacattagatggaaccccaggatcaagcaacaacagccgaatccagtggagcagcgttacatggagctcttagccttacgcgacgaatacataaagcggcttgaggaactgcagctcgccaactctgccaagctttctgatcccccaacttcaccttccagtccttcgcaaatgatgccccatgtgcaaactcacttctacccatacgacgtaccagattacgcttagcttaagatacattgatgagtttggacaaaccacaactagaatgcagtgaaaaaaatgctttatttgtgaaatttgtgatgctattgctttatttgtaaccattataagctgcaataaacaagttctgattttgtagttaacacgtgcgaccgagcggccgcaggaacccctagtgatggagttggccactccctctctgcgcgctcgctcgctcactgaggccgggcgaccaaaggtcgcccgacgcccgggctttgcccgggcggcctcagtgagcgagcgagcgcgcagctgcctgcagg

SEQ ID NO: 53 - DNA, 4050 bp, synthetic construct
  misc_feature 1..4050: note = Synthetic
  source 1..4050: mol_type = other DNA
cctgcaggcagctgcgcgctcgctcgctcactgaggccgcccgggcaaagcccgggcgtcgggcgacctttggtcgcccggcctcagtgagcgagcgagcgcgcagagagggagtggccaactccatcactaggggttcctgcggccgcagccgtgttttagagctagaaatagcaagttaaaataaggctagtccgtagcgcgtgcgccaattctgcagacaaattctagaggtaccacccttcagattaaaaataactgaggtaagggcctgggtaggggaggtggtgtgagacgctcctgtctctcctctatctgcccatcggccctttggggaggaggaatgtgcccaaggactaaaaaaaggccatggagccagaggggcgagggcaacagacctttcatgggcaaaccttggggccctgctgtctagcatgccccactacgggtctaggctgcccatgtaaggaggcaaggcctggggacacccgagatgcctggttataattaacccagacatgtggctgcccccccccccccaacacctgctgcctctaaaaataaccctgtccctggtggatcccctgcatgcgaagatcttcgaacaaggctgtgggggactgagggcaggctgtaacaggcttgggggccagggcttatacgtgcctgggactcccaaagtattactgttccatgttcccggcgaagggccagctgtcccccgccagctagactcagcacttagtttaggaaccagtgagcaagtcagcccttggggcagcccatacaaggccatggggctgggcaagctgcacgcctgggtccggggtgggcacggtgcccgggcaacgagctgaaagctcatctgctctcaggggcccctccctggggacagcccctcctggctagtcacaccctgtaggctcctctatataacccaggggcacaggggctgccctcattctaccaccacctccacagcacagacagacactcaggagccagccagctagcagtggctatcatactggctattatcaggtaagtaatcactcagcatcttttcctgacaatttttttgtagttatgtgactttgttttgtaaatttataaaatactacttgcttctctctttatattactaaaaaataaaaataaaaaaatacaactgtctgaggcttaaattactcttgcattgtccctaagtataattttagttaattttaaaaagcttcaattgtttctcagccagtaccccagcctgtcctttaactctttcctacattttccttagtgtctttcagacttggttcagggcgaacagtccatttgctgacctcggtttgttctgttgactcttgggggttggggctggaacccagcagagtgactgtcagactgatccatgagaaggctggcatagcttggtctgaagcagggcttcatagagaccgctgggcttgggagctctgtggaggctctggggtgggcctcttgttagccacaagtctgtttctcctccagagtccgtgtatctgtcagctaaaggggcccttcctgccagatggtaagcgacagctgcttggggagcccagcccctgttctcagcttcctgctttagaagcggagcctggtgctcaccatatgctccctgcctcgcagtctttgttttggttcagggaatttggacgtctctggtgcttcggacgtctctggtgcttcaggtctaggttcctgtctcactagtaggcagaccagcagacttttttttattgtgatatgggataacctaggcatactgcactgtacactctgacatatgaagtgctctagtcaagtttaactggtgtccacagaggacatggtttaactggaattcgtcaagcctctggttctaatttctcatttgcaggcttctgcatcaacttctaaatataattcacactccttggagaatgagtctataaagaggacgtctcgagatggagtgaatcgagatctcactgaggctgttcctcgacttccaggagaaacactaatcactgacaaagaagttatttacatatgtccttttaatggccccattaagggaagagtttacatcacaaattatcgtctttatttaagaagtttggaaacggattcttctctaatacttgatgttcctctgggtgtgatctcgagaattgaaaaaatgggaggcgcgacaagtagaggagaaaattcctatggtctagatattacttgtaaagacatgagaaacctcagatttgcattgaaacaggaaggccacagcagaagagatatgtttgagatcctcacgagatacgcgtttcccctggctcacagtctgccattatttgcatttttaaatgaagaaaagtttaacgtggatggatggacagtttacaatccagtggaagaatacaggaggcagggcttgcccaatcaccattggagaataacttttattaataagtgctatgagctctgtgacacttaccctgctcttttggtggttccgtatcgtgcctcagatgatgacctccggagagttgcaacttttaggtcccgaaatcgaattccagtgctgtcatggattcatccagaaaataagacggtcattgtgcgttgcagtcagcctcttgtcggtatgagtgggaaacgaaataaagatgatgagaaatatctcgatgttatcagggagactaataaacaaatttctaaactcaccatttatgatgcaagacccagcgtaaatgcagtggccaacaaggcaacaggaggaggatatgaaagtgatgatgcatatcataacgccgaacttttcttcttagacattcataatattcatgttatgcgggaatctttaaaaaaagtgaaggacattgtttatcctaatgtagaagaatctcattggttgtccagtttggagtctactcattggttagaacatatcaagctcgttttgacaggagccattcaagtagcagacaaagtttcttcagggaagagttcagtgcttgtgcattgcagtgacggatgggacaggactgctcagctgacatccttggccatgctgatgttggatagcttctataggagcattgaagggttcgaaatactggtacaaaaagaatggataagttttggacataaatttgcatctcgaataggtcatggtgataaaaaccacaccgatgctgaccgttctcctatttttctccagtttattgattgtgtgtggcaaatgtcaaaacagttccctacagcttttgaattcaatgaacaatttttgattataattttggatcatctgtatagttgccgatttggtactttcttattcaactgtgaatctgctcgagaaagacagaaggttacagaaaggactgtttctttatggtcactgataaacagtaataaagaaaaattcaaaaaccccttctatactaaagaaatcaatcgagttttatatccagttgccagtatgcgtcacttggaactctgggtgaattactacattagatggaaccccaggatcaagcaacaacagccgaatccagtggagcagcgttacatggagctcttagccttacgcgacgaatacataaagcggcttgaggaactgcagctcgccaactctgccaagctttctgatcccccaacttcaccttccagtccttcgcaaatgatgccccatgtgcaaactcacttctacccatacgacgtaccagattacgcttagcttaagatacattgatgagtttggacaaaccacaactagaatgcagtgaaaaaaatgctttatttgtgaaatttgtgatgctattgctttatttgtaaccattataagctgcaataaacaagttctgattttgtagttaacacgtgcgaccgagcggccgcaggaacccctagtgatggagttggccactccctctctgcgcgctcgctcgctcactgaggccgggcgaccaaaggtcgcccgacgcccgggctttgcccgggcggcctcagtgagcgagcgagcgcgcagctgcctgcagg

SEQ ID NO: 54 - DNA, 4032 bp, synthetic construct
  misc_feature 1..4032: note = Synthetic
  source 1..4032: mol_type = other DNA
cctgcaggcagctgcgcgctcgctcgctcactgaggccgcccgggcaaagcccgggcgtcgggcgacctttggtcgcccggcctcagtgagcgagcgagcgcgcagagagggagtggccaactccatcactaggggttcctgcggccgcagccgtgttttagagctagaaatagcaagttaaaataaggctagtccgtagcgcgtgcgccaattctgcagacaaattctagaggtaccacccttcagattaaaaataactgaggtaagggcctgggtaggggaggtggtgtgagacgctcctgtctctcctctatctgcccatcggccctttggggaggaggaatgtgcccaaggactaaaaaaaggccatggagccagaggggcgagggcaacagacctttcatgggcaaaccttggggccctgctgtctagcatgccccactacgggtctaggctgcccatgtaaggaggcaaggcctggggacacccgagatgcctggttataattaacccagacatgtggctgcccccccccccccaacacctgctgcctctaaaaataaccctgtccctggtggatcccctgcatgcgaagatcttcgaacaaggctgtgggggactgagggcaggctgtaacaggcttgggggccagggcttatacgtgcctgggactcccaaagtattactgttccatgttcccggcgaagggccagctgtcccccgccagctagactcagcacttagtttaggaaccagtgagcaagtcagcccttggggcagcccatacaaggccatggggctgggcaagctgcacgcctgggtccggggtgggcacggtgcccgggcaacgagctgaaagctcatctgctctcaggggcccctccctggggacagcccctcctggctagtcacaccctgtaggctcctctatataacccaggggcacaggggctgccctcattctaccaccacctccacagcacagacagacactcaggagccagccagctagcagtggctatcatactggctattatcaggtaagtaatcactcagcatcttttcctgacaatttttttgtagttatgtgactttgttttgtaaatttataaaatactacttgcttctctctttatattactaaaaaataaaaataaaaaaatacaactgtctgaggcttaaattactcttgcattgtccctaagtataattttagttaattttaaaaagcttcaattggacttcatcacaaaagaagttatgtttccccctaccccatcctttacccagttccagtggagcttccctttggggcatacacacagtctctgatgcaagtgctgatgtgccggtggctggacggtgttcactgtgattcccctctactgctaggtggcttcccgataataagcctgtctgcctggtggtcatccccttggtggtcttatttgaagatcctctttcctctcaagtggtttcagacgaagctcctccacaaacactgggataaatggtttgtaactgattggcattggcatgagggagcttggctggtttttagcagtgctgctgattgatgctcatgctccatgctttggcaaaaatctaactaacatgattgggaagaagctggagttttctggctgatgaaggtgttctgtattcttcattgaggaatgttccttttcaattatgaacaccccacccccaacacacacacacactagtaggcagaccagcagacttttttttattgtgatatgggataacctaggcatactgcactgtacactctgacatatgaagtgctctagtcaagtttaactggtgtccacagaggacatggtttaactggaattcgtcaagcctctggttctaatttctcatttgcaggcttctgcatcaacttctaaatataattcacactccttggagaatgagtctataaagaggacgtctcgagatggagtgaatcgagatctcactgaggctgttcctcgacttccaggagaaacactaatcactgacaaagaagttatttacatatgtccttttaatggccccattaagggaagagtttacatcacaaattatcgtctttatttaagaagtttggaaacggattcttctctaatacttgatgttcctctgggtgtgatctcgagaattgaaaaaatgggaggcgcgacaagtagaggagaaaattcctatggtctagatattacttgtaaagacatgagaaaccttagatttgcgttgaaacaggaaggccacagcagaagagatatgtttgagatcctcacgagatacgcgtttcccctggctcacagtctgccattatttgcatttttaaatgaagaaaagtttaacgtggatggatggacagtttacaatccagtggaagaatacaggaggcagggcttgcccaatcaccattggagaataacttttattaataagtgctatgagctctgtgacacttaccctgctcttttggtggttccgtatcgtgcctcagatgatgacctccggagagttgcaacttttaggtcccgaaatcgaattccagtgctgtcatggattcatccagaaaataagacggtcattgtgcgttgcagtcagcctcttgtcggtatgagtgggaaacgaaataaagatgatgagaaatatctcgatgttatcagggagactaataaacaaatttctaaactcaccatttatgatgcaagacccagcgtaaatgcagtggccaacaaggcaacaggaggaggatatgaaagtgatgatgcatatcataacgccgaacttttcttcttagacattcataatattcatgttatgcgggaatctttaaaaaaagtgaaggacattgtttatcctaatgtagaagaatctcattggttgtccagtttggagtctactcattggttagaacatatcaagctcgttttgacaggagccattcaagtagcagacaaagtttcttcagggaagagttcagtgcttgtgcattgcagtgacggatgggacaggactgctcagctgacatccttggccatgctgatgttggatagcttctataggagcattgaagggttcgaaatactggtacaaaaagaatggataagttttggacataaatttgcatctcgaataggtcatggtgataaaaaccacaccgatgctgaccgttctcctatttttctccagtttattgattgtgtgtggcaaatgtcaaaacagttccctacagcttttgaattcaatgaacaatttttgattataattttggatcatctgtatagttgccgatttggtactttcttattcaactgtgaatctgctcgagaaagacagaaggttacagaaaggactgtttctttatggtcactgataaacagtaataaagaaaaattcaaaaaccccttctatactaaagaaatcaatcgagttttatatccagttgccagtatgcgtcacttggaactctgggtgaattactacattagatggaaccccaggatcaagcaacaacagccgaatccagtggagcagcgttacatggagctcttagccttacgcgacgaatacataaagcggcttgaggaactgcagctcgccaactctgccaagctttctgatcccccaacttcaccttccagtccttcgcaaatgatgccccatgtgcaaactcacttctacccatacgacgtaccagattacgcttagcttaagatacattgatgagtttggacaaaccacaactagaatgcagtgaaaaaaatgctttatttgtgaaatttgtgatgctattgctttatttgtaaccattataagctgcaataaacaagttctgattttgtagttaacacgtgcgaccgagcggccgcaggaacccctagtgatggagttggccactccctctctgcgcgctcgctcgctcactgaggccgggcgaccaaaggtcgcccgacgcccgggctttgcccgggcggcctcagtgagcgagcgagcgcgcagctgcctgcagg

SEQ ID NO: 55 - DNA, 4047 bp, synthetic construct
  misc_feature 1..4047: note = Synthetic
  source 1..4047: mol_type = other DNA
cctgcaggcagctgcgcgctcgctcgctcactgaggccgcccgggcaaagcccgggcgtcgggcgacctttggtcgcccggcctcagtgagcgagcgagcgcgcagagagggagtggccaactccatcactaggggttcctgcggccgcagccgtgttttagagctagaaatagcaagttaaaataaggctagtccgtagcgcgtgcgccaattctgcagacaaattctagaggtaccacccttcagattaaaaataactgaggtaagggcctgggtaggggaggtggtgtgagacgctcctgtctctcctctatctgcccatcggccctttggggaggaggaatgtgcccaaggactaaaaaaaggccatggagccagaggggcgagggcaacagacctttcatgggcaaaccttggggccctgctgtctagcatgccccactacgggtctaggctgcccatgtaaggaggcaaggcctggggacacccgagatgcctggttataattaacccagacatgtggctgcccccccccccccaacacctgctgcctctaaaaataaccctgtccctggtggatcccctgcatgcgaagatcttcgaacaaggctgtgggggactgagggcaggctgtaacaggcttgggggccagggcttatacgtgcctgggactcccaaagtattactgttccatgttcccggcgaagggccagctgtcccccgccagctagactcagcacttagtttaggaaccagtgagcaagtcagcccttggggcagcccatacaaggccatggggctgggcaagctgcacgcctgggtccggggtgggcacggtgcccgggcaacgagctgaaagctcatctgctctcaggggcccctccctggggacagcccctcctggctagtcacaccctgtaggctcctctatataacccaggggcacaggggctgccctcattctaccaccacctccacagcacagacagacactcaggagccagccagctagcagtggctatcatactggctattatcaggtaagtaatcactcagcatcttttcctgacaatttttttgtagttatgtgactttgttttgtaaatttataaaatactacttgcttctctctttatattactaaaaaataaaaataaaaaaatacaactgtctgaggcttaaattactcttgcattgtccctaagtataattttagttaattttaaaaagcttcaattgaggtattttttgtttttgataatttagatatttaagattaataaacaataatatagttactacttttcactttgcatcttttgactaattacaatactaatttatttacttcctttcttcattttgctataatacatttggactgcacagatcctttctctgctactgtagagctgttgtgatccattccaagcttaaatcctttcctcacaaaaagtagtggtgagttcacctttccatttcttcagattgtatctacttttactactaggacacctactcattgaaagtttgtatggtaaagtaccatttaacctttttttccaatcaatgtttatactgcctaactatattttacgtgtccattaattattttaaaagcactgcaatagttactttagattttaatatcaaattctaaaactaaccagccataatgtagtgaggtttttaaattgacactggtatcccaattttatttatacagacttttaggaaactagtaggcagaccagcagacttttttttattgtgatatgggataacctaggcatactgcactgtacactctgacatatgaagtgctctagtcaagtttaactggtgtccacagaggacatggtttaactggaattcgtcaagcctctggttctaatttctcatttgcaggcttctgcatcaacttctaaatataattcacactccttggagaatgagtctataaagaggacgtctcgagatggagtgaatcgagatctcactgaggctgttcctcgacttccaggagaaacactaatcactgacaaagaagttatttacatatgtccttttaatggccccattaagggaagagtttacatcacaaattatcgtctttatttaagaagtttggaaacggattcttctctaatacttgatgttcctctgggtgtgatctcgagaattgaaaaaatgggaggcgcgacaagtagaggagaaaattcctatggtctagatattacttgtaaagacatgagaaatctaagattcgctttgaaacaggaaggccacagcagaagagatatgtttgagatcctcacgagatacgcgtttcccctggctcacagtctgccattatttgcatttttaaatgaagaaaagtttaacgtggatggatggacagtttacaatccagtggaagaatacaggaggcagggcttgcccaatcaccattggagaataacttttattaataagtgctatgagctctgtgacacttaccctgctcttttggtggttccgtatcgtgcctcagatgatgacctccggagagttgcaacttttaggtcccgaaatcgaattccagtgctgtcatggattcatccagaaaataagacggtcattgtgcgttgcagtcagcctcttgtcggtatgagtgggaaacgaaataaagatgatgagaaatatctcgatgttatcagggagactaataaacaaatttctaaactcaccatttatgatgcaagacccagcgtaaatgcagtggccaacaaggcaacaggaggaggatatgaaagtgatgatgcatatcataacgccgaacttttcttcttagacattcataatattcatgttatgcgggaatctttaaaaaaagtgaaggacattgtttatcctaatgtagaagaatctcattggttgtccagtttggagtctactcattggttagaacatatcaagctcgttttgacaggagccattcaagtagcagacaaagtttcttcagggaagagttcagtgcttgtgcattgcagtgacggatgggacaggactgctcagctgacatccttggccatgctgatgttggatagcttctataggagcattgaagggttcgaaatactggtacaaaaagaatggataagttttggacataaatttgcatctcgaataggtcatggtgataaaaaccacaccgatgctgaccgttctcctatttttctccagtttattgattgtgtgtggcaaatgtcaaaacagttccctacagcttttgaattcaatgaacaatttttgattataattttggatcatctgtatagttgccgatttggtactttcttattcaactgtgaatctgctcgagaaagacagaaggttacagaaaggactgtttctttatggtcactgataaacagtaataaagaaaaattcaaaaaccccttctatactaaagaaatcaatcgagttttatatccagttgccagtatgcgtcacttggaactctgggtgaattactacattagatggaaccccaggatcaagcaacaacagccgaatccagtggagcagcgttacatggagctcttagccttacgcgacgaatacataaagcggcttgaggaactgcagctcgccaactctgccaagctttctgatcccccaacttcaccttccagtccttcgcaaatgatgccccatgtgcaaactcacttctacccatacgacgtaccagattacgcttagcttaagatacattgatgagtttggacaaaccacaactagaatgcagtgaaaaaaatgctttatttgtgaaatttgtgatgctattgctttatttgtaaccattataagctgcaataaacaagttctgattttgtagttaacacgtgcgaccgagcggccgcaggaacccctagtgatggagttggccactccctctctgcgcgctcgctcgctcactgaggccgggcgaccaaaggtcgcccgacgcccgggctttgcccgggcggcctcagtgagcgagcgagcgcgcagctgcctgcagg

SEQ ID NO: 56 - DNA, 23 bp, synthetic construct
  misc_feature 1..23: note = Synthetic
  source 1..23: mol_type = other DNA
ttctaatttctcatttgcaggct

SEQ ID NO: 57 - DNA, 60 bp, synthetic construct
  misc_feature 1..60: note = Synthetic
  source 1..60: mol_type = other DNA
gcttctgcatcaacttctaaatataattcacactccttggagaatgagtctataaagagg

SEQ ID NO: 58 - protein, 20 aa, synthetic construct
  REGION 1..20: note = Synthetic
ASASTSKYNSHSLENESIKR

SEQ ID NO: 59 - DNA, 60 bp, synthetic construct
  misc_feature 1..60: note = Synthetic
  source 1..60: mol_type = other DNA
acgtctcgagatggagtgaatcgagatctcactgaggctgttccycgacttccaggagaa

SEQ ID NO: 60 - protein, 20 aa, synthetic construct
  REGION 1..20: note = Synthetic
TSRDGVNRDLTEAVPRLPGE

SEQ ID NO: 61 - DNA, 60 bp, synthetic construct
  misc_feature 1..60: note = Synthetic
  source 1..60: mol_type = other DNA
acactaatcactgacaaagaagttatttacatatgtccttttaatggccccattaaggga

SEQ ID NO: 62 - protein, 20 aa, synthetic construct
  REGION 1..20: note = Synthetic
TLITDKEVIYICPFNGPIKG

SEQ ID NO: 63 - protein, 5 aa, synthetic construct
  REGION 1..5: note = Synthetic
NLRFA

SEQ ID NO: 64 - DNA, 15 bp, synthetic construct
  misc_feature 1..15: note = Synthetic
  source 1..15: mol_type = other DNA
aatctaagattcgct

SEQ ID NO: 65 - DNA, 15 bp, synthetic construct
  misc_feature 1..15: note = Synthetic
  source 1..15: mol_type = other DNA
aacctcagatttgca

SEQ ID NO: 66 - DNA, 15 bp, synthetic construct
  misc_feature 1..15: note = Synthetic
  source 1..15: mol_type = other DNA
aaccttagatttgct

SEQ ID NO: 67 - DNA, 15 bp, synthetic construct
  misc_feature 1..15: note = Synthetic
  source 1..15: mol_type = other DNA
aaccttagattcgcg

SEQ ID NO: 68 - DNA, 15 bp, synthetic construct
  misc_feature 1..15: note = Synthetic
  source 1..15: mol_type = other DNA
aaccttagatttgcg

SEQ ID NO: 69 - DNA, 15 bp, synthetic construct
  misc_feature 1..15: note = Synthetic
  source 1..15: mol_type = other DNA
aacctgagattcgcc

SEQ ID NO: 70 - DNA, 15 bp, synthetic construct
  misc_feature 1..15: note = Synthetic
  source 1..15: mol_type = other DNA
aacctaagattcgcc

SEQ ID NO: 71 - DNA, 15 bp, synthetic construct
  misc_feature 1..15: note = Synthetic
  source 1..15: mol_type = other DNA
aacctgagatttgcg

SEQ ID NO: 72 - DNA, 15 bp, synthetic construct
  misc_feature 1..15: note = Synthetic
  source 1..15: mol_type = other DNA
aatctcagattcgcc

SEQ ID NO: 73 - DNA, 15 bp, synthetic construct
  misc_feature 1..15: note = Synthetic
  source 1..15: mol_type = other DNA
aatctaagattcgct

SEQ ID NO: 74 - DNA, 15 bp, synthetic construct
  misc_feature 1..15: note = Synthetic
  source 1..15: mol_type = other DNA
aaccttagattcgcc

SEQ ID NO: 75 - DNA, 15 bp, synthetic construct
  misc_feature 1..15: note = Synthetic
  source 1..15: mol_type = other DNA
aatcttagattcgcg

SEQ ID NO: 76 - DNA, 34 bp, Homo sapiens
  source 1..34: mol_type = genomic DNA
aatgaaggcctccacctcccgtccgtccccacag

SEQ ID NO: 77 - DNA, 34 bp, Macaca mulatta; identical to SEQ ID NO: 76
  source 1..34: mol_type = genomic DNA

SEQ ID NO: 78 - DNA, 32 bp, Mus musculus
  source 1..32: mol_type = genomic DNA
aatgaagcatccacactccaccatccccacag

SEQ ID NO: 79 - DNA, 34 bp, unidentified
  source 1..34: mol_type = genomic DNA; note = Canis familiaris
aatgaaggcctctgcgtcccgtccgttcccacag

SEQ ID NO: 80 - DNA, 33 bp, Elephas maximus
  source 1..33: mol_type = genomic DNA
aatgaaggcctccacaccccgtccatcccacag

SEQ ID NO: 81 - DNA, 23 bp, synthetic construct
  misc_feature 1..23: note = Synthetic
  source 1..23: mol_type = other DNA
cctcccgtccgtccccacagaaa

SEQ ID NO: 82 - DNA, 23 bp, synthetic construct
  misc_feature 1..23: note = Synthetic
  source 1..23: mol_type = other DNA
ccacccgtccttccccacagaaa

SEQ ID NO: 83 - DNA, 23 bp, synthetic construct
  misc_feature 1..23: note = Synthetic
  source 1..23: mol_type = other DNA
cccaccgtccgtccccacagaaa

SEQ ID NO: 84 - DNA, 23 bp, synthetic construct
  misc_feature 1..23: note = Synthetic
  source 1..23: mol_type = other DNA
ccacccgtccgttcccacagaaa

SEQ ID NO: 85 - DNA, 23 bp, synthetic construct
  misc_feature 1..23: note = Synthetic
  source 1..23: mol_type = other DNA
cctcccgtcccaccccacagaaa

SEQ ID NO: 86 - DNA, 23 bp, synthetic construct
  misc_feature 1..23: note = Synthetic
  source 1..23: mol_type = other DNA
cctcccgcacgtccccacagaaa

SEQ ID NO: 87 - DNA, 23 bp, synthetic construct
  misc_feature 1..23: note = Synthetic
  source 1..23: mol_type = other DNA
cctcccgtccgcacccacagaaa

SEQ ID NO: 88 - DNA, 212 bp, synthetic construct; identical to SEQ ID NO: 16
  misc_feature 1..212: note = Synthetic
  source 1..212: mol_type = other DNA

SEQ ID NO: 89 - DNA, 217 bp, synthetic construct
  misc_feature 1..217: note = Synthetic
  source 1..217: mol_type = other DNA
gtacgtgcagtgagtgctgcggaggggcgcagaggcccgcgccctggctggccctgtgcatgctgccttgcgccctgctcccaggtgctcactaacccgtaatctgctgctctgtgtgcatgtgctgcccggcagggctgtcgtgtgcgtgttgggtgggaaggcggaggcggcgcggggcgggctggcctctgagcatctggctgcatttagcacg

SEQ ID NO: 90 - DNA, 11 bp, synthetic construct
  misc_feature 1..11: note = Synthetic
  source 1..11: mol_type = other DNA
ggaacaatggc

SEQ ID NO: 91 - DNA, 11 bp, synthetic construct
  misc_feature 1..11: note = Synthetic
  source 1..11: mol_type = other DNA
accaacatggc

SEQ ID NO: 92 - DNA, 11 bp, synthetic construct
  misc_feature 1..11: note = Synthetic
  source 1..11: mol_type = other DNA
gattacatggc

SEQ ID NO: 93 - DNA, 11 bp, synthetic construct
  misc_feature 1..11: note = Synthetic
  source 1..11: mol_type = other DNA
ccagtgatggc

SEQ ID NO: 94 - DNA, 11 bp, synthetic construct
  misc_feature 1..11: note = Synthetic
  source 1..11: mol_type = other DNA
agcggcatggc

SEQ ID NO: 95 - DNA, 11 bp, synthetic construct
  misc_feature 1..11: note = Synthetic
  source 1..11: mol_type = other DNA
ctttccatggc

SEQ ID NO: 96 - DNA, 11 bp, synthetic construct
  misc_feature 1..11: note = Synthetic
  source 1..11: mol_type = other DNA
ttgctgatggc

SEQ ID NO: 97 - DNA, 11 bp, synthetic construct
  misc_feature 1..11: note = Synthetic
  source 1..11: mol_type = other DNA
aagaacatggc

SEQ ID NO: 98 - DNA, 11 bp, synthetic construct
  misc_feature 1..11: note = Synthetic
  source 1..11: mol_type = other DNA
tgccagatggc

SEQ ID NO: 99 - DNA, 11 bp, synthetic construct
  misc_feature 1..11: note = Synthetic
  source 1..11: mol_type = other DNA
ggataaatggc

SEQ ID NO: 100 - DNA, 11 bp, synthetic construct
  misc_feature 1..11: note = Synthetic
  source 1..11: mol_type = other DNA
gtttgtatggc

SEQ ID NO: 101 - DNA, 15 bp, synthetic construct
  misc_feature 1..15: note = Synthetic
  misc_feature 6: note = n is a, c, g, or t
  misc_feature 15: note = n is a, c, g, or t
  source 1..15: mol_type = other DNA
aayctnagattygcn

SEQ ID NO: 102 - DNA, 27 bp, synthetic construct
  misc_feature 1..27: note = Synthetic
  source 1..27: mol_type = other DNA
agtggctatcatactggctattatcag

SEQ ID NO: 103 - DNA, 199 bp, synthetic construct
  misc_feature 1..199: note = Synthetic
  source 1..199: mol_type = other DNA
gtaagtaatcactcagcatcttttcctgacaatttttttgtagttatgtgactttgttttgtaaatttataaaatactacttgcttctctctttatattactaaaaaataaaaataaaaaaatacaactgtctgaggcttaaattactcttgcattgtccctaagtataattttagttaattttaaaaagcttcaattg

SEQ ID NO: 104 - DNA, 167 bp, synthetic construct
  misc_feature 1..167: note = Synthetic
  source 1..167: mol_type = other DNA
actagtaggcagaccagcagacttttattgtgatatgggataacctaggcatactgcactgtacactctgacatatgaagtgctctagtcaagtttaactggtgtccacagaggacatggtttaactggaattcgtcaagcctctggttctaatttctcatttgcag

SEQ ID NO: 105 - DNA, 4060 bp, synthetic construct
  misc_feature 1..4060: note = Synthetic
  misc_feature 2076..2085: note = n is a, c, g, or t
  source 1..4060: mol_type = other DNA
cctgcaggcagctgcgcgctcgctcgctcactgaggccgcccgggcaaagcccgggcgtcgggcgacctttggtcgcccggcctcagtgagcgagcgagcgcgcagagagggagtggccaactccatcactaggggttcctgcggccgcagccgtgttttagagctagaaatagcaagttaaaataaggctagtccgtagcgcgtgcgccaattctgcagacaaattctagaggtaccacccttcagattaaaaataactgaggtaagggcctgggtaggggaggtggtgtgagacgctcctgtctctcctctatctgcccatcggccctttggggaggaggaatgtgcccaaggactaaaaaaaggccatggagccagaggggcgagggcaacagacctttcatgggcaaaccttggggccctgctgtctagcatgccccactacgggtctaggctgcccatgtaaggaggcaaggcctggggacacccgagatgcctggttataattaacccagacatgtggctgcccccccccccccaacacctgctgcctctaaaaataaccctgtccctggtggatcccctgcatgcgaagatcttcgaacaaggctgtgggggactgagggcaggctgtaacaggcttgggggccagggcttatacgtgcctgggactcccaaagtattactgttccatgttcccggcgaagggccagctgtcccccgccagctagactcagcacttagtttaggaaccagtgagcaagtcagcccttggggcagcccatacaaggccatggggctgggcaagctgcacgcctgggtccggggtgggcacggtgcccgggcaacgagctgaaagctcatctgctctcaggggcccctccctggggacagcccctcctggctagtcacaccctgtaggctcctctatataacccaggggcacaggggctgccctcattctaccaccacctccacagcacagacagacactcaggagccagccagctagcagtggctatcatactggctattatcaggtaagtaatcactcagcatcttttcctgacaatttttttgtagttatgtgactttgttttgtaaatttataaaatactacttgcttctctctttatattactaaaaaataaaaataaaaaaatacaactgtctgaggcttaaattactcttgcattgtccctaagtataattttagttaattttaaaaagcttcaattggagcctcctgcccctcaccaggccctgttagcatcacctcgggcacctggccacagcaggggccagtcagggcaccccgggatagcacgcccaggccctgtgcaaggcctctggcacttaggagaggcttttgcccctttgtcctctgagcagaagggttggcaaagagggaaggggacaggccagttctgcacctggcctttctccagaatgaaggcctccacctcccgtccgtccccacagaaagaaaagtaaactgttttcgcggctgcgcagaaagaagaacatggtacgtgcagtgagtgctgcggaggggcgcagaggcccgcgccctggctggccctgtgcatgcgccttgcgccctgctcccaggtgccactaacccgtaatctggctctgtgtgcagtgctgcccggcagggctgtcgtgtgcgtgttgggtgggaaggcggaggcggcgcggggcgggctggcctctgagcatctggctgcatttagcacgactagtaggcagaccagcagacttttttttattgtgatatgggataacctaggcatactgcactgtacactctgacatatgaagtgctctagtcaagtttaactggtgtccacagaggacatggtttaactggaattcgtcaagcctctggttctaatttctcatttgcaggcttctgcatcaacttctaaatataattcacactccttggagaatgagtctataaagaggacgtctcgagatggagtgaatcgagatctcactgaggctgttcctcgacttccaggagaaacactaatcactgacaaagaagttatttacatatgtccatttannnnnnnnnnatggccccattaagggaagagtttacatcacaaattatcgtctttatttaagaagtttggaaacggattcttctctaatacttgatgttcctctgggtgtgatctcgagaattgaaaaaatgggaggcgcgacaagtagaggagaaaattcctatggtctagatattacttgtaaagacatgagaaacctgaggttcgctttgaaacaggaaggccacagcagaagagatatgtttgagatcctcacgagatacgcgtttcccctggctcacagtctgccattatttgcatttttaaatgaagaaaagtttaacgtggatggatggacagtttacaatccagtggaagaatacaggaggcagggcttgcccaatcaccattggagaataacttttattaataagtgctatgagctctgtgacacttaccctgctcttttggtggttccgtatcgtgcctcagatgatgacctccggagagttgcaacttttaggtcccgaaatcgaattccagtgctgtcatggattcatccagaaaataagacggtcattgtgcgttgcagtcagcctcttgtcggtatgagtgggaaacgaaataaagatgatgagaaatatctcgatgttatcagggagactaataaacaaatttctaaactcaccatttatgatgcaagacccagcgtaaatgcagtggccaacaaggcaacaggaggaggatatgaaagtgatgatgcatatcataacgccgaacttttcttcttagacattcataatattcatgttatgcgggaatctttaaaaaaagtgaaggacattgtttatcctaatgtagaagaatctcattggttgtccagtttggagtctactcattggttagaacatatcaagctcgttttgacaggagccattcaagtagcagacaaagtttcttcagggaagagttcagtgcttgtgcattgcagtgacggatgggacaggactgctcagctgacatccttggccatgctgatgttggatagcttctataggagcattgaagggttcgaaatactggtacaaaaagaatggataagttttggacataaatttgcatctcgaataggtcatggtgataaaaaccacaccgatgctgaccgttctcctatttttctccagtttattgattgtgtgtggcaaatgtcaaaacagttccctacagcttttgaattcaatgaacaatttttgattataattttggatcatctgtatagttgccgatttggtactttcttattcaactgtgaatctgctcgagaaagacagaaggttacagaaaggactgtttctttatggtcactgataaacagtaataaagaaaaattcaaaaaccccttctatactaaagaaatcaatcgagttttatatccagttgccagtatgcgtcacttggaactctgggtgaattactacattagatggaaccccaggatcaagcaacaacagccgaatccagtggagcagcgttacatggagctcttagccttacgcgacgaatacataaagcggcttgaggaactgcagctcgccaactctgccaagctttctgatcccccaacttcaccttccagtccttcgcaaatgatgccccatgtgcaaactcacttctacccatacgacgtaccagattacgcttagcttaagatacattgatgagtttggacaaaccacaactagaatgcagtgaaaaaaatgctttatttgtgaaatttgtgatgctattgctttatttgtaaccattataagctgcaataaacaagttctgattttgtagttaacacgtgcgaccgagcggccgcaggaacccctagtgatggagttggccactccctctctgcgcgctcgctcgctcactgaggccgggcgaccaaaggtcgcccgacgcccgggctttgcccgggcggcctcagtgagcgagcgagcgcgcagctgcctgcagg

SEQ ID NO: 106 - DNA, 4714 bp, synthetic construct
  misc_feature 1..4714: note = Synthetic
  misc_feature 2138..2147: note = n is a, c, g, or t
  source 1..4714: mol_type = other DNA
cctgcaggcagctgcgcgctcgctcgctcactgaggccgcccgggcaaagcccgggcgtcgggcgacctttggtcgcccggcctcagtgagcgagcgagcgcgcagagagggagtggccaactccatcactaggggttcctgcggccgcagccgtgttttagagctagaaatagcaagttaaaataaggctagtccgtagcgcgtgcgccaattctgcagacaaattctagaggtaccacccttcagattaaaaataactgaggtaagggcctgggtaggggaggtggtgtgagacgctcctgtctctcctctatctgcccatcggccctttggggaggaggaatgtgcccaaggactaaaaaaaggccatggagccagaggggcgagggcaacagacctttcatgggcaaaccttggggccctgctgtctagcatgccccactacgggtctaggctgcccatgtaaggaggcaaggcctggggacacccgagatgcctggttataattaacccagacatgtggctgcccccccccccccaacacctgctgcctctaaaaataaccctgtccctggtggatcccctgcatgcgaagatcttcgaacaaggctgtgggggactgagggcaggctgtaacaggcttgggggccagggcttatacgtgcctgggactcccaaagtattactgttccatgttcccggcgaagggccagctgtcccccgccagctagactcagcacttagtttaggaaccagtgagcaagtcagcccttggggcagcccatacaaggccatggggctgggcaagctgcacgcctgggtccggggtgggcacggtgcccgggcaacgagctgaaagctcatctgctctcaggggcccctccctggggacagcccctcctggctagtcacaccctgtaggctcctctatataacccaggggcacaggggctgccctcattctaccaccacctccacagcacagacagacactcaggagccagccagctagcagtggctatcatactggctattatcaggtaagtaatcactcagcatcttttcctgacaatttttttgtagttatgtgactttgttttgtaaatttataaaatactacttgcttctctctttatattactaaaaaataaaaataaaaaaatacaactgtctgaggcttaaattactcttgcattgtccctaagtataattttagttaattttaaaaagcttcaattggagcctcctgcccctcaccaggccctgttagcatcacctcgggcacctggccacagcaggggccagtcagggcaccccgggatagcacgcccaggccctgtgcaaggcctctggcacttaggagaggcttttgcccctttgtcctctgagcagaagggttggcaaagagggaaggggacaggccagttctgcacctggcctttctccagaatgaaggcctccacctcccgtccgtccccacagaaagaaaagtaaactgttttcgcggctgcgcagaaagaagaacatggtacgtgcagtgagtgctgcggaggggcgcagaggcccgcgccctggctggccctgtgcatgcgccttgcgccctgctcccaggtgccactaacccgtaatctggctctgtgtgcagtgctgcccggcagggctgtcgtgtgcgtgttgggtgggaaggcggaggcggcgcggggcgggctggcctctgagcatctggctgcatttagcacgactagtaggcagaccagcagacttttttttattgtgatatgggataacctaggcatactgcactgtacactctgacatatgaagtgctctagtcaagtttaactggtgtccacagaggacatggtttaactggaattcgtcaagcctctggttctaatttctcatttgcagccgaccgtcattagcgcatctgtggctccaaggacagcggctgagccccggtccccagggccagttcctcacccggcccagagcaaggccactgaggctgggggtggaaacccaagtggcatctattcagccatcatcagccgcaattttcctattatcggagtgaaagagaagacattcgagcaacttcacaagaaatgtcttgaaaagaaagttctttatgtannnnnnnnnngaccctgagttcccaccggacgagacctctctcttttatagccagaagttccccatccagttcgtctggaagagacctccggaaatatgtgagaatccccgatttatcattgatggagccaacagaactgacatctgtcaaggagagctaggggactgctggtttctcgcagccattgcctgcctgaccctgaaccagcaccttcttttccgagtcataccccatgatcaaagtttcatcgaaaactacgcagggatcttccacttccagttctggcgctatggagagtgggtggacgtggttatagatgactgcctgccaacgtacaacaatcaactggttttcaccaagtccaaccaccgcaatgagttctggagtgctctgctggagaaggcttatgctaagctccatggttcctacgaagctctgaaaggtgggaacaccacagaggccatggaggacttcacaggaggggtggcagagttttttgagatcagggatgctcctagtgacatgtacaagatcatgaagaaagccatcgagagaggctccctcatgggctgctccattgatgatggcacgaacatgacctatggaacctctccttctggtctgaacatgggggagttgattgcacggatggtaaggaatatggataactcactgctccaggactcagacctcgaccccagaggctcagatgaaagaccgacccggacaatcattccggttcagtatgagacaagaatggcctgcgggctggtcagaggtcacgcctactctgtcacggggctggatgaggtcccgttcaaaggtgagaaagtgaagctggtgcggctgcggaatccgtggggccaggtggagtggaacggttcttggagtgatagatggaaggactggagctttgtggacaaagatgagaaggcccgtctgcagcaccaggtcactgaggatggagagttctggatgtcctatgaggatttcatctaccatttcacaaagttggagatctgcaacctcacggccgatgctctgcagtctgacaagcttcagacctggacagtgtctgtgaacgagggccgctgggtacggggttgctctgccggaggctgccgcaacttcccagatactttctggaccaaccctcagtaccgtctgaagctcctggaggaggacgatgaccctgatgactcggaggtgatttgcagcttcctggtggccctgatgcagaagaaccggcggaaggaccggaagctaggggccagtctcttcaccattggcttcgccatctacgaggttcccaaagagatgcacgggaacaagcagcacctgcagaaggacttcttcctgtacaacgcctccaaggccaggagcaaaacctacatcaacatgcgggaggtgtcccagcgcttccgcctgcctcccagcgagtacgtcatcgtgccctccacctacgagccccaccaggagggggaattcatcctccgggtcttctctgaaaagaggaacctctctgaggaagttgaaaataccatctccgtggatcggccagtgaaaaagaaaaaaaccaagcccatcatcttcgtttcggacagagcaaacagcaacaaggagctgggtgtggaccaggagtcagaggagggcaaaggcaaaacaagccctgataagcaaaagcagtccccacagccacagcctggcagctctgatcaggaaagtgaggaacagcaacaattccggaacattttcaagcagatagcaggagatgacatggagatctgtgcagatgagctcaagaaggtccttaacacagtcgtgaacaaacacaaggacctgaagacacacgggttcacactggagtcctgccgtagcatgattgcgctcatggatacagatggctctggaaagctcaacctgcaggagttccaccacctctggaacaagattaaggcctggcagaaaattttcaaacactatgacacagaccagtccggcaccatcaacagctacgagatgcgaaatgcagtcaacgacgcaggattccacctcaacaaccagctctatgacatcattaccatgcggtacgcagacaaacacatgaacatcgactttgacagtttcatctgctgcttcgttaggctggagggcatgttcagagcttttcatgcatttgacaaggatggagatggtatcatcaagctcaacgttctggagtggctgcagctcaccatgtatgcctacccatacgacgtaccagattacgcttagcttaagatacattgatgagtttggacaaaccacaactagaatgcagtgaaaaaaatgctttatttgtgaaatttgtgatgctattgctttatttgtaaccattataagctgcaataaacaagttctgattttgtagttaacacgtgcgaccgagcggccgcaggaacccctagtgatggagttggccactccctctctgcgcgctcgctcgctcactgaggccgggcgaccaaaggtcgcccgacgcccgggctttgcccgggcggcctcagtgagcgagcgagcgcgcagctgcctgcagg

SEQ ID NO: 107 - DNA, 501 bp, synthetic construct
  misc_feature 1..501: note = Synthetic
  source 1..501: mol_type = other DNA
gagcctcctgcccctcaccaggccctgttagcatcacctcgggcacctggccacagcaggggccagtcagggcaccccgggatagcacgcccaggccctgtgcaaggcctctggcacttaggagaggcttttgcccctttgtcctctgagcagaagggttggcaaagagggaaggggacaggccagttctgcacctggcctttctccagaatgaaggcctccacctcccgtccgtccccacagaaagaaaagtaaactgttttcgcggctgcgcagaaagaagaacatggtacgtgcagtgagtgctgcggaggggcgcagaggcccgcgccctggctggccctgtgcatgcgccttgcgccctgctcccaggtgccactaacccgtaatctggctctgtgtgcagtgctgcccggcagggctgtcgtgtgcgtgttgggtgggaaggcggaggcggcgcggggcgggctggcctctgagcatctggctgcatttagcacg

SEQ ID NO: 108 - DNA, 502 bp, synthetic construct
  misc_feature 1..502: note = Synthetic
  source 1..502: mol_type = other DNA
gagcctcctgcccctcaccaggccctgttagcatcacctcgggcacctggccacagcaggggccagtcagggcaccccgggatagcacgcccaggccctgtgcaaggcctctggcacttaggagaggcttttgcccctttgtcctctgagcagaagggttggcaaagagggaaggggacaggccagttctgcacctggcctttctccagaatgaaggcctccacctcccgtccgtccccacagaaagaaaagtaaactgttttcgcggctgcgcagaaagaagaacatggtacgtgcagtgagtgctgcggaggggcgcagaggcccgcgccctggctggccctgtgcatgcgccttgcgccctgctcccaggtgccactaacccgtaatctggctctgtgtgcatgtgctgcccggcagggctgtcgtgtgcgtgttgggtgggaaggcggaggcggcgcggggcgggctggcctctgagcatctggctgcatttagcacg

SEQ ID NO: 109 - DNA, 503 bp, synthetic construct
  misc_feature 1..503: note = Synthetic
  source 1..503: mol_type = other DNA
gagcctcctgcccctcaccaggccctgttagcatcacctcgggcacctggccacagcaggggccagtcagggcaccccgggatagcacgcccaggccctgtgcaaggcctctggcacttaggagaggcttttgcccctttgtcctctgagcagaagggttggcaaagagggaaggggacaggccagttctgcacctggcctttctccagaatgaaggcctccacctcccgtccgtccccacagaaagaaaagtaaactgttttcgcggctgcgcagaaagaagaacatggtacgtgcagtgagtgctgcggaggggcgcagaggcccgcgccctggctggccctgtgcatgcgccttgcgccctgctcccaggtgccactaacccgtaatctgctgctctgtgtgcagtgctgcccggcagggctgtcgtgtgcgtgttgggtgggaaggcggaggcggcgcggggcgggctggcctctgagcatctggctgcatttagcacg

SEQ ID NO: 110 - DNA, 504 bp, synthetic construct
  misc_feature 1..504: note = Synthetic
  source 1..504: mol_type = other DNA
gagcctcctgcccctcaccaggccctgttagcatcacctcgggcacctggccacagcaggggccagtcagggcaccccgggatagcacgcccaggccctgtgcaaggcctctggcacttaggagaggcttttgcccctttgtcctctgagcagaagggttggcaaagagggaaggggacaggccagttctgcacctggcctttctccagaatgaaggcctccacctcccgtccgtccccacagaaagaaaagtaaactgttttcgcggctgcgcagaaagaagaacatggtacgtgcagtgagtgctgcggaggggcgcagaggcccgcgccctggctggccctgtgcatgcgccttgcgccctgctcccaggtgccactaacccgtaatctgctgctctgtgtgcatgtgctgcccggcagggctgtcgtgtgcgtgttgggtgggaaggcggaggcggcgcggggcgggctggcctctgagcatctggctgcatttagcacg

SEQ ID NO: 111 - DNA, 502 bp, synthetic construct
  misc_feature 1..502: note = Synthetic
  source 1..502: mol_type = other DNA
gagcctcctgcccctcaccaggccctgttagcatcacctcgggcacctggccacagcaggggccagtcagggcaccccgggatagcacgcccaggccctgtgcaaggcctctggcacttaggagaggcttttgcccctttgtcctctgagcagaagggttggcaaagagggaaggggacaggccagttctgcacctggcctttctccagaatgaaggcctccacctcccgtccgtccccacagaaagaaaagtaaactgttttcgcggctgcgcagaaagaagaacatggtacgtgcagtgagtgctgcggaggggcgcagaggcccgcgccctggctggccctgtgcatgcgccttgcgccctgctcccaggtgctcactaacccgtaatctggctctgtgtgcagtgctgcccggcagggctgtcgtgtgcgtgttgggtgggaaggcggaggcggcgcggggcgggctggcctctgagcatctggctgcatttagcacg

SEQ ID NO: 112 - DNA, 503 bp, synthetic construct
  misc_feature 1..503: note = Synthetic
  source 1..503: mol_type = other DNA
gagcctcctgcccctcaccaggccctgttagcatcacctcgggcacctggccacagcaggggccagtcagggcaccccgggatagcacgcccaggccctgtgcaaggcctctggcacttaggagaggcttttgcccctttgtcctctgagcagaagggttggcaaagagggaaggggacaggccagttctgcacctggcctttctccagaatgaaggcctccacctcccgtccgtccccacagaaagaaaagtaaactgttttcgcggctgcgcagaaagaagaacatggtacgtgcagtgagtgctgcggaggggcgcagaggcccgcgccctggctggccctgtgcatgcgccttgcgccctgctcccaggtgctcactaacccgtaatctggctctgtgtgcatgtgctgcccggcagggctgtcgtgtgcgtgttgggtgggaaggcggaggcggcgcggggcgggctggcctctgagcatctggctgcatttagcacg

SEQ ID NO: 113 - DNA, 504 bp, synthetic construct
  misc_feature 1..504: note = Synthetic
  source 1..504: mol_type = other DNA
gagcctcctgcccctcaccaggccctgttagcatcacctcgggcacctggccacagcaggggccagtcagggcaccccgggatagcacgcccaggccctgtgcaaggcctctggcacttaggagaggcttttgcccctttgtcctctgagcagaagggttggcaaagagggaaggggacaggccagttctgcacctggcctttctccagaatgaaggcctccacctcccgtccgtccccacagaaagaaaagtaaactgttttcgcggctgcgcagaaagaagaacatggtacgtgcagtgagtgctgcggaggggcgcagaggcccgcgccctggctggccctgtgcatgcgccttgcgccctgctcccaggtgctcactaacccgtaatctgctgctctgtgtgcagtgctgcccggcagggctgtcgtgtgcgtgttgggtgggaaggcggaggcggcgcggggcgggctggcctctgagcatctggctgcatttagcacg

SEQ ID NO: 114 - DNA, 505 bp, synthetic construct
  misc_feature 1..505: note = Synthetic
  source 1..505: mol_type = other DNA
gagcctcctgcccctcaccaggccctgttagcatcacctcgggcacctggccacagcaggggccagtcagggcaccccgggatagcacgcccaggccctgtgcaaggcctctggcacttaggagaggcttttgcccctttgtcctctgagcagaagggttggcaaagagggaaggggacaggccagttctgcacctggcctttctccagaatgaaggcctccacctcccgtccgtccccacagaaagaaaagtaaactgttttcgcggctgcgcagaaagaagaacatggtacgtgcagtgagtgctgcggaggggcgcagaggcccgcgccctggctggccctgtgcatgcgccttgcgccctgctcccaggtgctcactaacccgtaatctgctgctctgtgtgcatgtgctgcccggcagggctgtcgtgtgcgtgttgggtgggaaggcggaggcggcgcggggcgggctggcctctgagcatctggctgcatttagcacg

SEQ ID NO: 115 - DNA, 502 bp, synthetic construct
  misc_feature 1..502: note = Synthetic
  source 1..502: mol_type = other DNA
gagcctcctgcccctcaccaggccctgttagcatcacctcgggcacctggccacagcaggggccagtcagggcaccccgggatagcacgcccaggccctgtgcaaggcctctggcacttaggagaggcttttgcccctttgtcctctgagcagaagggttggcaaagagggaaggggacaggccagttctgcacctggcctttctccagaatgaaggcctccacctcccgtccgtccccacagaaagaaaagtaaactgttttcgcggctgcgcagaaagaagaacatggtacgtgcagtgagtgctgcggaggggcgcagaggcccgcgccctggctggccctgtgcatgctgccttgcgccctgctcccaggtgccactaacccgtaatctggctctgtgtgcagtgctgcccggcagggctgtcgtgtgcgtgttgggtgggaaggcggaggcggcgcggggcgggctggcctctgagcatctggctgcatttagcacg

SEQ ID NO: 116 - DNA, 503 bp, synthetic construct
  misc_feature 1..503: note = Synthetic
  source 1..503: mol_type = other DNA
gagcctcctgcccctcaccaggccctgttagcatcacctcgggcacctggccacagcaggggccagtcagggcaccccgggatagcacgcccaggccctgtgcaaggcctctggcacttaggagaggcttttgcccctttgtcctctgagcagaagggttggcaaagagggaaggggacaggccagttctgcacctggcctttctccagaatgaaggcctccacctcccgtccgtccccacagaaagaaaagtaaactgttttcgcggctgcgcagaaagaagaacatggtacgtgcagtgagtgctgcggaggggcgcagaggcccgcgccctggctggccctgtgcatgctgccttgcgccctgctcccaggtgccactaacccgtaatctggctctgtgtgcatgtgctgcccggcagggctgtcgtgtgcgtgttgggtgggaaggcggaggcggcgcggggcgggctggcctctgagcatctggctgcatttagcacg

SEQ ID NO: 117 - DNA, 504 bp, synthetic construct
  misc_feature 1..504: note = Synthetic
  source 1..504: mol_type = other DNA
gagcctcctgcccctcaccaggccctgttagcatcacctcgggcacctggccacagcaggggccagtcagggcaccccgggatagcacgcccaggccctgtgcaaggcctctggcacttaggagaggcttttgcccctttgtcctctgagcagaagggttggcaaagagggaaggggacaggccagttctgcacctggcctttctccagaatgaaggcctccacctcccgtccgtccccacagaaagaaaagtaaactgttttcgcggctgcgcagaaagaagaacatggtacgtgcagtgagtgctgcggaggggcgcagaggcccgcgccctggctggccctgtgcatgctgccttgcgccctgctcccaggtgccactaacccgtaatctgctgctctgtgtgcagtgctgcccggcagggctgtcgtgtgcgtgttgggtgggaaggcggaggcggcgcggggcgggctggcctctgagcatctggctgcatttagcacg

SEQ ID NO: 118 - DNA, 505 bp, synthetic construct
  misc_feature 1..505: note = Synthetic
  source 1..505: mol_type = other DNA
gagcctcctgcccctcaccaggccctgttagcatcacctcgggcacctggccacagcaggggccagtcagggcaccccgggatagcacgcccaggccctgtgcaaggcctctggcacttaggagaggcttttgcccctttgtcctctgagcagaagggttggcaaagagggaaggggacaggccagttctgcacctggcctttctccagaatgaaggcctccacctcccgtccgtccccacagaaagaaaagtaaactgttttcgcggctgcgcagaaagaagaacatggtacgtgcagtgagtgctgcggaggggcgcagaggcccgcgccctggctggccctgtgcatgctgccttgcgccctgctcccaggtgccactaacccgtaatctgctgctctgtgtgcatgtgctgcccggcagggctgtcgtgtgcgtgttgggtgggaaggcggaggcggcgcggggcgggctggcctctgagcatctggctgcatttagcacg

SEQ ID NO: 119 - DNA, 503 bp, synthetic construct
  misc_feature 1..503: note = Synthetic
  source 1..503: mol_type = other DNA
gagcctcctgcccctcaccaggccctgttagcatcacctcgggcacctggccacagcaggggccagtcagggcaccccgggatagcacgcccaggccctgtgcaaggcctctggcacttaggagaggcttttgcccctttgtcctctgagcagaagggttggcaaagagggaaggggacaggccagttctgcacctggcctttctccagaatgaaggcctccacctcccgtccgtccccacagaaagaaaagtaaactgttttcgcggctgcgcagaaagaagaacatggtacgtgcagtgagtgctgcggaggggcgcagaggcccgcgccctggctggccctgtgcatgctgccttgcgccctgctcccaggtgctcactaacccgtaatctggctctgtgtgcagtgctgcccggcagggctgtcgtgtgcgtgttgggtgggaaggcggaggcggcgcggggcgggctggcctctgagcatctggctgcatttagcacg

SEQ ID NO: 120 - DNA, 504 bp, synthetic construct
  misc_feature 1..504: note = Synthetic
  source 1..504: mol_type = other DNA
gagcctcctgcccctcaccaggccctgttagcatcacctcgggcacctggccacagcaggggccagtcagggcaccccgggatagcacgcccaggccctgtgcaaggcctctggcacttaggagaggcttttgcccctttgtcctctgagcagaagggttggcaaagagggaaggggacaggccagttctgcacctggcctttctccagaatgaaggcctccacctcccgtccgtccccacagaaagaaaagtaaactgttttcgcggctgcgcagaaagaagaacatggtacgtgcagtgagtgctgcggaggggcgcagaggcccgcgccctggctggccctgtgcatgctgccttgcgccctgctcccaggtgctcactaacccgtaatctggctctgtgtgcatgtgctgcccggcagggctgtcgtgtgcgtgttgggtgggaaggcggaggcggcgcggggcgggctggcctctgagcatctggctgcatttagcacg

SEQ ID NO: 121 - DNA, 505 bp, synthetic construct
  misc_feature 1..505: note = Synthetic
  source 1..505: mol_type = other DNA
gagcctcctgcccctcaccaggccctgttagcatcacctcgggcacctggccacagcaggggccagtcagggcaccccgggatagcacgcccaggccctgtgcaaggcctctggcacttaggagaggcttttgcccctttgtcctctgagcagaagggttggcaaagagggaaggggacaggccagttctgcacctggcctttctccagaatgaaggcctccacctcccgtccgtccccacagaaagaaaagtaaactgttttcgcggctgcgcagaaagaagaacatggtacgtgcagtgagtgctgcggaggggcgcagaggcccgcgccctggctggccctgtgcatgctgccttgcgccctgctcccaggtgctcactaacccgtaatctgctgctctgtgtgcagtgctgcccggcagggctgtcgtgtgcgtgttgggtgggaaggcggaggcggcgcggggcgggctggcctctgagcatctggctgcatttagcacg

SEQ ID NO: 122 - DNA, 506 bp, synthetic construct
  misc_feature 1..506: note = Synthetic
  source 1..506: mol_type = other DNA
gagcctcctgcccctcaccaggccctgttagcatcacctcgggcacctggccacagcaggggccagtcagggcaccccgggatagcacgcccaggccctgtgcaaggcctctggcacttaggagaggcttttgcccctttgtcctctgagcagaagggttggcaaagagggaaggggacaggccagttctgcacctggcctttctccagaatgaaggcctccacctcccgtccgtccccacagaaagaaaagtaaactgttttcgcggctgcgcagaaagaagaacatggtacgtgcagtgagtgctgcggaggggcgcagaggcccgcgccctggctggccctgtgcatgctgccttgcgccctgctcccaggtgctcactaacccgtaatctgctgctctgtgtgcatgtgctgcccggcagggctgtcgtgtgcgtgttgggtgggaaggcggaggcggcgcggggcgggctggcctctgagcatctggctgcatttagcacg

SEQ ID NO: 123 - DNA, 501 bp, synthetic construct
  misc_feature 1..501: note = Synthetic
  source 1..501: mol_type = other DNA
gagcctcctgcccctcaccaggccctgttagcatcacctcgggcacctggccacagcaggggccagtcagggcaccccgggatagcacgcccaggccctgtgcaaggcctctggcacttaggagaggcttttgcccctttgtcctctgagcagaagggttggcaaagagggaaggggacaggccagttctgcacctggcctttctccagaatgaaggcctccacctcccgtccgtccccacagaaagaaaagtaaactgttttcgcggctgcgcagaaagaagaacatggtaagtgcagtgagtgctgcggaggggcgcagaggcccgcgccctggctggccctgtgcatgcgccttgcgccctgctcccaggtgccactaacccgtaatctggctctgtgtgcagtgctgcccggcagggctgtcgtgtgcgtgttgggtgggaaggcggaggcggcgcggggcgggctggcctctgagcatctggctgcatttagcacg

SEQ ID NO: 124 - DNA, 502 bp, synthetic construct
  misc_feature 1..502: note = Synthetic
  source 1..502: mol_type = other DNA
gagcctcctgcccctcaccaggccctgttagcatcacctcgggcacctggccacagcaggggccagtcagggcaccccgggatagcacgcccaggccctgtgcaaggcctctggcacttaggagaggcttttgcccctttgtcctctgagcagaagggttggcaaagagggaaggggacaggccagttctgcacctggcctttctccagaatgaaggcctccacctcccgtccgtccccacagaaagaaaagtaaactgttttcgcggctgcgcagaaagaagaacatggtaagtgcagtgagtgctgcggaggggcgcagaggcccgcgccctggctggccctgtgcatgcgccttgcgccctgctcccaggtgccactaacccgtaatctggctctgtgtgcatgtgctgcccggcagggctgtcgtgtgcgtgttgggtgggaaggcggaggcggcgcggggcgggctggcctctgagcatctggctgcatttagcacg

SEQ ID NO: 125 - DNA, 503 bp, synthetic construct
  misc_feature 1..503: note = Synthetic
  source 1..503: mol_type = other DNA
gagcctcctgcccctcaccaggccctgttagcatcacctcgggcacctggccacagcaggggccagtcagggcaccccgggatagcacgcccaggccctgtgcaaggcctctggcacttaggagaggcttttgcccctttgtcctctgagcagaagggttggcaaagagggaaggggacaggccagttctgcacctggcctttctccagaatgaaggcctccacctcccgtccgtccccacagaaagaaaagtaaactgttttcgcggctgcgcagaaagaagaacatggtaagtgcagtgagtgctgcggaggggcgcagaggcccgcgccctggctggccctgtgcatgcgccttgcgccctgctcccaggtgccactaacccgtaatctgctgctctgtgtgcagtgctgcccggcagggctgtcgtgtgcgtgttgggtgggaaggcggaggcggcgcggggcgggctggcctctgagcatctggctgcatttagcacg

SEQ ID NO: 126 - DNA, 504 bp, synthetic construct
  misc_feature 1..504: note = Synthetic
  source 1..504: mol_type = other DNA
gagcctcctgcccctcaccaggccctgttagcatcacctcgggcacctggccacagcaggggccagtcagggcaccccgggatagcacgcccaggccctgtgcaaggcctctggcacttaggagaggcttttgcccctttgtcctctgagcagaagggttggcaaagagggaaggggacaggccagttctgcacctggcctttctccagaatgaaggcctccacctcccgtccgtccccacagaaagaaaagtaaactgttttcgcggctgcgcagaaagaagaacatggtaagtgcagtgagtgctgcggaggggcgcagaggcccgcgccctggctggccctgtgcatgcgccttgcgccctgctcccaggtgccactaacccgtaatctgctgctctgtgtgcatgtgctgcccggcagggctgtcgtgtgcgtgttgggtgggaaggcggaggcggcgcggggcgggctggcctctgagcatctggctgcatttagcacg

SEQ ID NO: 127 - DNA, 502 bp, synthetic construct
  misc_feature 1..502: note = Synthetic
  source 1..502: mol_type = other DNA
gagcctcctgcccctcaccaggccctgttagcatcacctcgggcacctggccacagcaggggccagtcagggcaccccgggatagcacgcccaggccctgtgcaaggcctctggcacttaggagaggcttttgcccctttgtcctctgagcagaagggttggcaaagagggaaggggacaggccagttctgcacctggcctttctccagaatgaaggcctccacctcccgtccgtccccacagaaagaaaagtaaactgttttcgcggctgcgcagaaagaagaacatggtaagtgcagtgagtgctgcggaggggcgcagaggcccgcgccctggctggccctgtgcatgcgccttgcgccctgctcccaggtgctcactaacccgtaatctggctctgtgtgcagtgctgcccggcagggctgtcgtgtgcgtgttgggtgggaaggcggaggcggcgcggggcgggctggcctctgagcatctggctgcatttagcacg

SEQ ID NO: 128 - DNA, 503 bp, synthetic construct
  misc_feature 1..503: note = Synthetic
  source 1..503: mol_type = other DNA
gagcctcctgcccctcaccaggccctgttagcatcacctcgggcacctggccacagcaggggccagtcagggcaccccgggatagcacgcccaggccctgtgcaaggcctctggcacttaggagaggcttttgcccctttgtcctctgagcagaagggttggcaaagagggaaggggacaggccagttctgcacctggcctttctccagaatgaaggcctccacctcccgtccgtccccacagaaagaaaagtaaactgttttcgcggctgcgcagaaagaagaacatggtaagtgcagtgagtgctgcggaggggcgcagaggcccgcgccctggctggccctgtgcatgcgccttgcgccctgctcccaggtgctcactaacccgtaatctggctctgtgtgcatgtgctgcccggcagggctgtcgtgtgcgtgttgggtgggaaggcggaggcggcgcggggcgggctggcctctgagcatctggctgcatttagcacg

SEQ ID NO: 129 - DNA, 504 bp, synthetic construct
  misc_feature 1..504: note = Synthetic
  source 1..504: mol_type = other DNA
gagcctcctgcccctcaccaggccctgttagcatcacctcgggcacctggccacagcaggggccagtcagggcaccccgggatagcacgcccaggccctgtgcaaggcctctggcacttaggagaggcttttgcccctttgtcctctgagcagaagggttggcaaagagggaaggggacaggccagttctgcacctggcctttctccagaatgaaggcctccacctcccgtccgtccccacagaaagaaaagtaaactgttttcgcggctgcgcagaaagaagaacatggtaagtgcagtgagtgctgcggaggggcgcagaggcccgcgccctggctggccctgtgcatgcgccttgcgccctgctcccaggtgctcactaacccgtaatctgctgctctgtgtgcagtgctgcccggcagggctgtcgtgtgcgtgttgggtgggaaggcggaggcggcgcggggcgggctggcctctgagcatctggctgcatttagcacg

SEQ ID NO: 130 - DNA, 505 bp, synthetic construct
  misc_feature 1..505: note = Synthetic
  source 1..505: mol_type = other DNA
gagcctcctgcccctcaccaggccctgttagcatcacctcgggcacctggccacagcaggggccagtcagggcaccccgggatagcacgcccaggccctgtgcaaggcctctggcacttaggagaggcttttgcccctttgtcctctgagcagaagggttggcaaagagggaaggggacaggccagttctgcacctggcctttctccagaatgaaggcctccacctcccgtccgtccccacagaaagaaaagtaaactgttttcgcggctgcgcagaaagaagaacatggtaagtgcagtgagtgctgcggaggggcgcagaggcccgcgccctggctggccctgtgcatgcgccttgcgccctgctcccaggtgctcactaacccgtaatctgctgctctgtgtgcatgtgctgcccggcagggctgtcgtgtgcgtgttgggtgggaaggcggaggcggcgcggggcgggctggcctctgagcatctggctgcatttagcacg

SEQ ID NO: 131 - DNA, 502 bp, synthetic construct
  misc_feature 1..502: note = Synthetic
  source 1..502: mol_type = other DNA
gagcctcctgcccctcaccaggccctgttagcatcacctcgggcacctggccacagcaggggccagtcagggcaccccgggatagcacgcccaggccctgtgcaaggcctctggcacttaggagaggcttttgcccctttgtcctctgagcagaagggttggcaaagagggaaggggacaggccagttctgcacctggcctttctccagaatgaaggcctccacctcccgtccgtccccacagaaagaaaagtaaactgttttcgcggctgcgcagaaagaagaacatggtaagtgcagtgagtgctgcggaggggcgcagaggcccgcgccctggctggccctgtgcatgctgccttgcgccctgctcccaggtgccactaacccgtaatctggctctgtgtgcagtgctgcccggcagggctgtcgtgtgcgtgttgggtgggaaggcggaggcggcgcggggcgggctggcctctgagcatctggctgcatttagcacg

SEQ ID NO: 132 - DNA, 503 bp, synthetic construct
  misc_feature 1..503: note = Synthetic
  source 1..503: mol_type = other DNA
gagcctcctgcccctcaccaggccctgttagcatcacctcgggcacctggccacagcaggggccagtcagggcaccccgggatagcacgcccaggccctgtgcaaggcctctggcacttaggagaggcttttgcccctttgtcctctgagcagaagggttggcaaagagggaaggggacaggccagttctgcacctggcctttctccagaatgaaggcctccacctcccgtccgtccccacagaaagaaaagtaaactgttttcgcggctgcgcagaaagaagaacatggtaagtgcagtgagtgctgcggaggggcgcagaggcccgcgccctggctggccctgtgcatgctgccttgcgccctgctcccaggtgccactaacccgtaatctggctctgtgtgcatgtgctgcccggcagggctgtcgtgtgcgtgttgggtgggaaggcggaggcggcgcggggcgggctggcctctgagcatctggctgcatttagcacg

SEQ ID NO: 133 - DNA, 504 bp, synthetic construct
  misc_feature 1..504: note = Synthetic
  source 1..504: mol_type = other DNA
gagcctcctgcccctcaccaggccctgttagcatcacctcgggcacctggccacagcaggggccagtcagggcaccccgggatagcacgcccaggccctgtgcaaggcctctggcacttaggagaggcttttgcccctttgtcctctgagcagaagggttggcaaagagggaaggggacaggccagttctgcacctggcctttctccagaatgaaggcctccacctcccgtccgtccccacagaaagaaaagtaaactgttttcgcggctgcgcagaaagaagaacatggtaagtgcagtgagtgctgcggaggggcgcagaggcccgcgccctggctggccctgtgcatgctgccttgcgccctgctcccaggtgccactaacccgtaatctgctgctctgtgtgcagtgctgcccggcagggctgtcgtgtgcgtgttgggtgggaaggcggaggcggcgcggggcgggctggcctctgagcatctggctgcatttagcacg

SEQ ID NO: 134 - DNA, 505 bp, synthetic construct
  misc_feature 1..505: note = Synthetic
  source 1..505: mol_type = other DNA
gagcctcctgcccctcaccaggccctgttagcatcacctcgggcacctggccacagcaggggccagtcagggcaccccgggatagcacgcccaggccctgtgcaaggcctctggcacttaggagaggcttttgcccctttgtcctctgagcagaagggttggcaaagagggaaggggacaggccagttctgcacctggcctttctccagaatgaaggcctccacctcccgtccgtccccacagaaagaaaagtaaactgttttcgcggctgcgcagaaagaagaacatggtaagtgcagtgagtgctgcggaggggcgcagaggcccgcgccctggctggccctgtgcatgctgccttgcgccctgctcccaggtgccactaacccgtaatctgctgctctgtgtgcatgtgctgcccggcagggctgtcgtgtgcgtgttgggtgggaaggcggaggcggcgcggggcgggctggcctctgagcatctggctgcatttagcacg

SEQ ID NO: 135 - DNA, 503 bp, synthetic construct
  misc_feature 1..503: note = Synthetic
  source 1..503: mol_type = other DNA
gagcctcctgcccctcaccaggccctgttagcatcacctcgggcacctggccacagcaggggccagtcagggcaccccgggatagcacgcccaggccctgtgcaaggcctctggcacttaggagaggcttttgcccctttgtcctctgagcagaagggttggcaaagagggaaggggacaggccagttctgcacctggcctttctccagaatgaaggcctccacctcccgtccgtccccacagaaagaaaagtaaactgttttcgcggctgcgcagaaagaagaacatggtaagtgcagtgagtgctgcggaggggcgcagaggcccgcgccctggctggccctgtgcatgctgccttgcgccctgctcccaggtgctcactaacccgtaatctggctctgtgtgcagtgctgcccggcagggctgtcgtgtgcgtgttgggtgggaaggcggaggcggcgcggggcgggctggcctctgagcatctggctgcatttagcacg

SEQ ID NO: 136 - DNA, 504 bp, synthetic construct
  misc_feature 1..504: note = Synthetic
  source 1..504: mol_type = other DNA
gagcctcctgcccctcaccaggccctgttagcatcacctcgggcacctggccacagcaggggccagtcagggcaccccgggatagcacgcccaggccctgtgcaaggcctctggcacttaggagaggcttttgcccctttgtcctctgagcagaagggttggcaaagagggaaggggacaggccagttctgcacctggcctttctccagaatgaaggcctccacctcccgtccgtccccacagaaagaaaagtaaactgttttcgcggctgcgcagaaagaagaacatggtaagtgcagtgagtgctgcggaggggcgcagaggcccgcgccctggctggccctgtgcatgctgccttgcgccctgctcccaggtgctcactaacccgtaatctggctctgtgtgcatgtgctgcccggcagggctgtcgtgtgcgtgttgggtgggaaggcggaggcggcgcggggcgggctggcctctgagcatctggctgcatttagcacg

SEQ ID NO: 137 - DNA, 505 bp, synthetic construct
  misc_feature 1..505: note = Synthetic
  source 1..505: mol_type = other DNA
gagcctcctgcccctcaccaggccctgttagcatcacctcgggcacctggccacagcaggggccagtcagggcaccccgggatagcacgcccaggccctgtgcaaggcctctggcacttaggagaggcttttgcccctttgtcctctgagcagaagggttggcaaagagggaaggggacaggccagttctgcacctggcctttctccagaatgaaggcctccacctcccgtccgtccccacagaaagaaaagtaaactgttttcgcggctgcgcagaaagaagaacatggtaagtgcagtgagtgctgcggaggggcgcagaggcccgcgccctggctggccctgtgcatgctgccttgcgccctgctcccaggtgctcactaacccgtaatctgctgctctgtgtgcagtgctgcccggcagggctgtcgtgtgcgtgttgggtgggaaggcggaggcggcgcggggcgggctggcctctgagcatctggctgcatttagcacg

SEQ ID NO: 138 - DNA, 506 bp, synthetic construct
  misc_feature 1..506: note = Synthetic
  source 1..506: mol_type = other DNA
gagcctcctgcccctcaccaggccctgttagcatcacctcgggcacctggccacagcaggggccagtcagggcaccccgggatagcacgcccaggccctgtgcaaggcctctggcacttaggagaggcttttgcccctttgtcctctgagcagaagggttggcaaagagggaaggggacaggccagttctgcacctggcctttctccagaatgaaggcctccacctcccgtccgtccccacagaaagaaaagtaaactgttttcgcggctgcgcagaaagaagaacatggtaagtgcagtgagtgctgcggaggggcgcagaggcccgcgccctggctggccctgtgcatgctgccttgcgccctgctcccaggtgctcactaacccgtaatctgctgctctgtgtgcatgtgctgcccggcagggctgtcgtgtgcgtgttgggtgggaaggcggaggcggcgcggggcgggctggcctctgagcatctggctgcatttagcacg

SEQ ID NO: 139 - DNA, 501 bp, synthetic construct
  misc_feature 1..501: note = Synthetic
  source 1..501: mol_type = other DNA
gagcctcctgcccctcaccaggccctgttagcatcacctcgggcacctggccacagcaggggccagtcagggcaccccgggatagcacgcccaggccctgtgcaaggcctctggcacttaggagaggcttttgcccctttgtcctctgagcagaagggttggcaaagagggaaggggacaggccagttctgcacctggcctttctccagaatgaaggcctccacctcccgtccgtccccacagaaagaaaagtaaactgttttcgcggctgcgcagaaagaagaacatggtaggtgcagtgagtgctgcggaggggcgcagaggcccgcgccctggctggccctgtgcatgcgccttgcgccctgctcccaggtgccactaacccgtaatctggctctgtgtgcagtgctgcccggcagggctgtcgtgtgcgtgttgggtgggaaggcggaggcggcgcggggcgggctggcctctgagcatctggctgcatttagcacg

SEQ ID NO: 140 - DNA, 502 bp, synthetic construct
  misc_feature 1..502: note = Synthetic
  source 1..502: mol_type = other DNA
gagcctcctgcccctcaccaggccctgttagcatcacctcgggcacctggccacagcaggggccagtcagggcaccccgggatagcacgcccaggccctgtgcaaggcctctggcacttaggagaggcttttgcccctttgtcctctgagcagaagggttggcaaagagggaaggggacaggccagttctgcacctggcctttctccagaatgaaggcctccacctcccgtccgtccccacagaaagaaaagtaaactgttttcgcggctgcgcagaaagaagaacatggtaggtgcagtgagtgctgcggaggggcgcagaggcccgcgccctggctggccctgtgcatgcgccttgcgccctgctcccaggtgccactaacccgtaatctggctctgtgtgcatgtgctgcccggcagggctgtcgtgtgcgtgttgggtgggaaggcggaggcggcgcggggcgggctggcctctgagcatctggctgcatttagcacg

SEQ ID NO: 141 - DNA, 503 bp, synthetic construct
  misc_feature 1..503: note = Synthetic
  source 1..503: mol_type = other DNA
gagcctcctgcccctcaccaggccctgttagcatcacctcgggcacctggccacagcaggggccagtcagggcaccccgggatagcacgcccaggccctgtgcaaggcctctggcacttaggagaggcttttgcccctttgtcctctgagcagaagggttggcaaagagggaaggggacaggccagttctgcacctggcctttctccagaatgaaggcctccacctcccgtccgtccccacagaaagaaaagtaaactgttttcgcggctgcgcagaaagaagaacatggtaggtgcagtgagtgctgcggaggggcgcagaggcccgcgccctggctggccctgtgcatgcgccttgcgccctgctcccaggtgccactaacccgtaatctgctgctctgtgtgcagtgctgcccggcagggctgtcgtgtgcgtgttgggtgggaaggcggaggcggcgcggggcgggctggcctctgagcatctggctgcatttagcacg

SEQ ID NO: 142 - DNA, 504 bp, synthetic construct
  misc_feature 1..504: note = Synthetic
  source 1..504: mol_type = other DNA
gagcctcctgcccctcaccaggccctgttagcatcacctcgggcacctggccacagcaggggccagtcagggcaccccgggatagcacgcccaggccctgtgcaaggcctctggcacttaggagaggcttttgcccctttgtcctctgagcagaagggttggcaaagagggaaggggacaggccagttctgcacctggcctttctccagaatgaaggcctccacctcccgtccgtccccacagaaagaaaagtaaactgttttcgcggctgcgcagaaagaagaacatggtaggtgcagtgagtgctgcggaggggcgcagaggcccgcgccctggctggccctgtgcatgcgccttgcgccctgctcccaggtgccactaacccgtaatctgctgctctgtgtgcatgtgctgcccggcagggctgtcgtgtgcgtgttgggtgggaaggcggaggcggcgcggggcgggctggcctctgagcatctggctgcatttagcacg

SEQ ID NO: 143 - DNA, 502 bp, synthetic construct
  misc_feature 1..502: note = Synthetic
  source 1..502: mol_type = other DNA
gagcctcctgcccctcaccaggccctgttagcatcacctcgggcacctggccacagcaggggccagtcagggcaccccgggatagcacgcccaggccctgtgcaaggcctctggcacttaggagaggcttttgcccctttgtcctctgagcagaagggttggcaaagagggaaggggacaggccagttctgcacctggcctttctccagaatgaaggcctccacctcccgtccgtccccacagaaagaaaagtaaactgttttcgcggctgcgcagaaagaagaacatggtaggtgcagtgagtgctgcggaggggcgcagaggcccgcgccctggctggccctgtgcatgcgccttgcgccctgctcccaggtgctcactaacccgtaatctggctctgtgtgcagtgctgcccggcagggctgtcgtgtgcgtgttgggtgggaaggcggaggcggcgcggggcgggctggcctctgagcatctggctgcatttagcacg

SEQ ID NO: 144 - DNA, 503 bp, synthetic construct
  misc_feature 1..503: note = Synthetic
  source 1..503: mol_type = other DNA
gagcctcctgcccctcaccaggccctgttagcatcacctcgggcacctggccacagcaggggccagtcagggcaccccgggatagcacgcccaggccctgtgcaaggcctctggcacttaggagaggcttttgcccctttgtcctctgagcagaagggttggcaaagagggaaggggacaggccagttctgcacctggcctttctccagaatgaaggcctccacctcccgtccgtccccacagaaagaaaagtaaactgttttcgcggctgcgcagaaagaagaacatggtaggtgcagtgagtgctgcggaggggcgcagaggcccgcgccctggctggccctgtgcatgcgccttgcgccctgctcccaggtgctcactaacccgtaatctggctctgtgtgcatgtgctgcccggcagggctgtcgtgtgcgtgttgggtgggaaggcggaggcggcgcggggcgggctggcctctgagcatctggctgcatttagcacg

SEQ ID NO: 145 - DNA, 504 bp, synthetic construct
  misc_feature 1..504: note = Synthetic
  source 1..504: mol_type = other DNA
gagcctcctgcccctcaccaggccctgttagcatcacctcgggcacctggccacagcaggggccagtcagggcaccccgggatagcacgcccaggccctgtgcaaggcctctggcacttaggagaggcttttgcccctttgtcctctgagcagaagggttggcaaagagggaaggggacaggccagttctgcacctggcctttctccagaatgaaggcctccacctcccgtccgtccccacagaaagaaaagtaaactgttttcgcggctgcgcagaaagaagaacatggtaggtgcagtgagtgctgcggaggggcgcagaggcccgcgccctggctggccctgtgcatgcgccttgcgccctgctcccaggtgctcactaacccgtaatctgctgctctgtgtgcagtgctgcccggcagggctgtcgtgtgcgtgttgggtgggaaggcggaggcggcgcggggcgggctggcctctgagcatctggctgcatttagcacg

SEQ ID NO: 146 - DNA, 505 bp, synthetic construct
  misc_feature 1..505: note = Synthetic
  source 1..505: mol_type = other DNA
gagcctcctgcccctcaccaggccctgttagcatcacctcgggcacctggccacagcaggggccagtcagggcaccccgggatagcacgcccaggccctgtgcaaggcctctggcacttaggagaggcttttgcccctttgtcctctgagcagaagggttggcaaagagggaaggggacaggccagttctgcacctggcctttctccagaatgaaggcctccacctcccgtccgtccccacagaaagaaaagtaaactgttttcgcggctgcgcagaaagaagaacatggtaggtgcagtgagtgctgcggaggggcgcagaggcccgcgccctggctggccctgtgcatgcgccttgcgccctgctcccaggtgctcactaacccgtaatctgctgctctgtgtgcatgtgctgcccggcagggctgtcgtgtgcgtgttgggtgggaaggcggaggcggcgcggggcgggctggcctctgagcatctggctgcatttagcacg

SEQ ID NO: 147 - DNA, 502 bp, synthetic construct
  misc_feature 1..502: note = Synthetic
  source 1..502: mol_type = other DNA
gagcctcctgcccctcaccaggccctgttagcatcacctcgggcacctggccacagcaggggccagtcagggcaccccgggatagcacgcccaggccctgtgcaaggcctctggcacttaggagaggcttttgcccctttgtcctctgagcagaagggttggcaaagagggaaggggacaggccagttctgcacctggcctttctccagaatgaaggcctccacctcccgtccgtccccacagaaagaaaagtaaactgttttcgcggctgcgcagaaagaagaacatggtaggtgcagtgagtgctgcggaggggcgcagaggcccgcgccctggctggccctgtgcatgctgccttgcgccctgctcccaggtgccactaacccgtaatctggctctgtgtgcagtgctgcccggcagggctgtcgtgtgcgtgttgggtgggaaggcggaggcggcgcggggcgggctggcctctgagcatctggctgcatttagcacg

SEQ ID NO: 148 - DNA, 503 bp, synthetic construct
  misc_feature 1..503: note = Synthetic
  source 1..503: mol_type = other DNA
gagcctcctgcccctcaccaggccctgttagcatcacctcgggcacctggccacagcaggggccagtcagggcaccccgggatagcacgcccaggccctgtgcaaggcctctggcacttaggagaggcttttgcccctttgtcctctgagcagaagggttggcaaagagggaaggggacaggccagttctgcacctggcctttctccagaatgaaggcctccacctcccgtccgtccccacagaaagaaaagtaaactgttttcgcggctgcgcagaaagaagaacatggtaggtgcagtgagtgctgcggaggggcgcagaggcccgcgccctggctggccctgtgcatgctgccttgcgccctgctcccaggtgccactaacccgtaatctggctctgtgtgcatgtgctgcccggcagggctgtcgtgtgcgtgttgggtgggaaggcggaggcggcgcggggcgggctggcctctgagcatctggctgcatttagcacg

SEQ ID NO: 149 - DNA, 504 bp, synthetic construct
  misc_feature 1..504: note = Synthetic
  source 1..504: mol_type = other DNA
gagcctcctgcccctcaccaggccctgttagcatcacctcgggcacctggccacagcaggggccagtcagggcaccccgggatagcacgcccaggccctgtgcaaggcctctggcacttaggagaggcttttgcccctttgtcctctgagcagaagggttggcaaagagggaaggggacaggccagttctgcacctggcctttctccagaatgaaggcctccacctcccgtccgtccccacagaaagaaaagtaaactgttttcgcggctgcgcagaaagaagaacatggtaggtgcagtgagtgctgcggaggggcgcagaggcccgcgccctggctggccctgtgcatgctgccttgcgccctgctcccaggtgccactaacccgtaatctgctgctctgtgtgcagtgctgcccggcagggctgtcgtgtgcgtgttgggtgggaaggcggaggcggcgcggggcgggctggcctctgagcatctggctgcatttagcacg

SEQ ID NO: 150 - DNA, 505 bp, synthetic construct
  misc_feature 1..505: note = Synthetic
  source 1..505: mol_type = other DNA
gagcctcctgcccctcaccaggccctgttagcatcacctcgggcacctggccacagcaggggccagtcagggcaccccgggatagcacgcccaggccctgtgcaaggcctctggcacttaggagaggcttttgcccctttgtcctctgagcagaagggttggcaaagagggaaggggacaggccagttctgcacctggcctttctccagaatgaaggcctccacctcccgtccgtccccacagaaagaaaagtaaactgttttcgcggctgcgcagaaagaagaacatggtaggtgcagtgagtgctgcggaggggcgcagaggcccgcgccctggctggccctgtgcatgctgccttgcgccctgctcccaggtgccactaacccgtaatctgctgctctgtgtgcatgtgctgcccggcagggctgtcgtgtgcgtgttgggtgggaaggcggaggcggcgcggggcgggctggcctctgagcatctggctgcatttagcacg

SEQ ID NO: 151 - DNA, 503 bp, synthetic construct
  misc_feature 1..503: note = Synthetic
  source 1..503: mol_type = other DNA
gagcctcctgcccctcaccaggccctgttagcatcacctcgggcacctggccacagcaggggccagtcagggcaccccgggatagcacgcccaggccctgtgcaaggcctctggcacttaggagaggcttttgcccctttgtcctctgagcagaagggttggcaaagagggaaggggacaggccagttctgcacctggcctttctccagaatgaaggcctccacctcccgtccgtccccacagaaagaaaagtaaactgttttcgcggctgcgcagaaagaagaacatggtaggtgcagtgagtgctgcggaggggcgcagaggcccgcgccctggctggccctgtgcatgctgccttgcgccctgctcccaggtgctcactaacccgtaatctggctctgtgtgcagtgctgcccggcagggctgtcgtgtgcgtgttgggtgggaaggcggaggcggcgcggggcgggctggcctctgagcatctggctgcatttagcacg

SEQ ID NO: 152 - DNA, 504 bp, synthetic construct
  misc_feature 1..504: note = Synthetic
  source 1..504: mol_type = other DNA
gagcctcctgcccctcaccaggccctgttagcatcacctcgggcacctggccacagcaggggccagtcagggcaccccgggatagcacgcccaggccctgtgcaaggcctctggcacttaggagaggcttttgcccctttgtcctctgagcagaagggttggcaaagagggaaggggacaggccagttctgcacctggcctttctccagaatgaaggcctccacctcccgtccgtccccacagaaagaaaagtaaactgttttcgcggctgcgcagaaagaagaacatggtaggtgcagtgagtgctgcggaggggcgcagaggcccgcgccctggctggccctgtgcatgctgccttgcgccctgctcccaggtgctcactaacccgtaatctggctctgtgtgcatgtgctgcccggcagggctgtcgtgtgcgtgttgggtgggaaggcggaggcggcgcggggcgggctggcctctgagcatctggctgcatttagcacg

SEQ ID NO: 153 - DNA, 505 bp, synthetic construct
  misc_feature 1..505: note = Synthetic
  source 1..505: mol_type = other DNA
gagcctcctgcccctcaccaggccctgttagcatcacctcgggcacctggccacagcaggggccagtcagggcaccccgggatagcacgcccaggccctgtgcaaggcctctggcacttaggagaggcttttgcccctttgtcctctgagcagaagggttggcaaagagggaaggggacaggccagttctgcacctggcctttctccagaatgaaggcctccacctcccgtccgtccccacagaaagaaaagtaaactgttttcgcggctgcgcagaaagaagaacatggtaggtgcagtgagtgctgcggaggggcgcagaggcccgcgccctggctggccctgtgcatgctgccttgcgccctgctcccaggtgctcactaacccgtaatctgctgctctgtgtgcagtgctgcccggcagggctgtcgtgtgcgtgttgggtgggaaggcggaggcggcgcggggcgggctggcctctgagcatctggctgcatttagcacg

SEQ ID NO: 154 - DNA, 506 bp, synthetic construct
  misc_feature 1..506: note = Synthetic
  source 1..506: mol_type = other DNA
gagcctcctgcccctcaccaggccctgttagcatcacctcgggcacctggccacagcaggggccagtcagggcaccccgggatagcacgcccaggccctgtgcaaggcctctggcacttaggagaggcttttgcccctttgtcctctgagcagaagggttggcaaagagggaaggggacaggccagttctgcacctggcctttctccagaatgaaggcctccacctcccgtccgtccccacagaaagaaaagtaaactgttttcgcggctgcgcagaaagaagaacatggtaggtgcagtgagtgctgcggaggggcgcagaggcccgcgccctggctggccctgtgcatgctgccttgcgccctgctcccaggtgctcactaacccgtaatctgctgctctgtgtgcatgtgctgcccggcagggctgtcgtgtgcgtgttgggtgggaaggcggaggcggcgcggggcgggctggcctctgagcatctggctgcatttagcacg

SEQ ID NO: 155 - DNA, 501 bp, synthetic construct
  misc_feature 1..501: note = Synthetic
  source 1..501: mol_type = other DNA
gagcctcctgcccctcaccaggccctgttagcatcacctcgggcacctggccacagcaggggccagtcagggcaccccgggatagcacgcccaggccctgtgcaaggcctctggcacttaggagaggcttttgcccctttgtcctctgagcagaagggttggcaaagagggaaggggacaggccagttctgcacctggcctttctccagaatgaaggcctccacctcccgtccgtccccacagaaagaaaagtaaactgttttcgcggctgcgcagaaagaagaacatggtatgtgcagtgagtgctgcggaggggcgcagaggcccgcgccctggctggccctgtgcatgcgccttgcgccctgctcccaggtgccactaacccgtaatctggctctgtgtgcagtgctgcccggcagggctgtcgtgtgcgtgttgggtgggaaggcggaggcggcgcggggcgggctggcctctgagcatctggctgcatttagcacg

SEQ ID NO: 156 - DNA, 502 bp, synthetic construct
  misc_feature 1..502: note = Synthetic
  source 1..502: mol_type = other DNA
gagcctcctgcccctcaccaggccctgttagcatcacctcgggcacctggccacagcaggggccagtcagggcaccccgggatagcacgcccaggccctgtgcaaggcctctggcacttaggagaggcttttgcccctttgtcctctgagcagaagggttggcaaagagggaaggggacaggccagttctgcacctggcctttctccagaatgaaggcctccacctcccgtccgtccccacagaaagaaaagtaaactgttttcgcggctgcgcagaaagaagaacatggtatgtgcagtgagtgctgcggaggggcgcagaggcccgcgccctggctggccctgtgcatgcgccttgcgccctgctcccaggtgccactaacccgtaatctggctctgtgtgcatgtgctgcccggcagggctgtcgtgtgcgtgttgggtgggaaggcggaggcggcgcggggcgggctggcctctgagcatctggctgcatttagcacg

SEQ ID NO: 157 - DNA, 503 bp, synthetic construct
  misc_feature 1..503: note = Synthetic
  source 1..503: mol_type = other DNA
gagcctcctgcccctcaccaggccctgttagcatcacctcgggcacctggccacagcaggggccagtcagggcaccccgggatagcacgcccaggccctgtgcaaggcctctggcacttaggagaggcttttgcccctttgtcctctgagcagaagggttggcaaagagggaaggggacaggccagttctgcacctggcctttctccagaatgaaggcctccacctcccgtccgtccccacagaaagaaaagtaaactgttttcgcggctgcgcagaaagaagaacatggtatgtgcagtgagtgctgcggaggggcgcagaggcccgcgccctggctggccctgtgcatgcgccttgcgccctgctcccaggtgccactaacccgtaatctgctgctctgtgtgcagtgctgcccggcagggctgtcgtgtgcgtgttgggtgggaaggcggaggcggcgcggggcgggctggcctctgagcatctggctgcatttagcacg

SEQ ID NO: 158 - DNA, 504 bp, synthetic construct
  misc_feature 1..504: note = Synthetic
  source 1..504: mol_type = other DNA
gagcctcctgcccctcaccaggccctgttagcatcacctcgggcacctggccacagcaggggccagtcagggcaccccgggatagcacgcccaggccctgtgcaaggcctctggcacttaggagaggcttttgcccctttgtcctctgagcagaagggttggcaaagagggaaggggacaggccagttctgcacctggcctttctccagaatgaaggcctccacctcccgtccgtccccacagaaagaaaagtaaactgttttcgcggctgcgcagaaagaagaacatggtatgtgcagtgagtgctgcggaggggcgcagaggcccgcgccctggctggccctgtgcatgcgccttgcgccctgctcccaggtgccactaacccgtaatctgctgctctgtgtgcatgtgctgcccggcagggctgtcgtgtgcgtgttgggtgggaaggcggaggcggcgcggggcgggctggcctctgagcatctggctgcatttagcacg

SEQ ID NO: 159 - DNA, 502 bp, synthetic construct
  misc_feature 1..502: note = Synthetic
  source 1..502: mol_type = other DNA
gagcctcctgcccctcaccaggccctgttagcatcacctcgggcacctggccacagcaggggccagtcagggcaccccgggatagcacgcccaggccctgtgcaaggcctctggcacttaggagaggcttttgcccctttgtcctctgagcagaagggttggcaaagagggaaggggacaggccagttctgcacctggcctttctccagaatgaaggcctccacctcccgtccgtccccacagaaagaaaagtaaactgttttcgcggctgcgcagaaagaagaacatggtatgtgcagtgagtgctgcggaggggcgcagaggcccgcgccctggctggccctgtgcatgcgccttgcgccctgctcccaggtgctcactaacccgtaatctggctctgtgtgcagtgctgcccggcagggctgtcgtgtgcgtgttgggtgggaaggcggaggcggcgcggggcgggctggcctctgagcatctggctgcatttagcacg

SEQ ID NO: 160 - DNA, 503 bp, synthetic construct
  misc_feature 1..503: note = Synthetic
  source 1..503: mol_type = other DNA
gagcctcctgcccctcaccaggccctgttagcatcacctcgggcacctggccacagcaggggccagtcagggcaccccgggatagcacgcccaggccctgtgcaaggcctctggcacttaggagaggcttttgcccctttgtcctctgagcagaagggttggcaaagagggaaggggacaggccagttctgcacctggcctttctccagaatgaaggcctccacctcccgtccgtccccacagaaagaaaagtaaactgttttcgcggctgcgcagaaagaagaacatggtatgtgcagtgagtgctgcggaggggcgcagaggcccgcgccctggctggccctgtgcatgcgccttgcgccctgctcccaggtgctcactaacccgtaatctggctctgtgtgcatgtgctgcccggcagggctgtcgtgtgcgtgttgggtgggaaggcggaggcggcgcggggcgggctggcctctgagcatctggctgcatttagcacg

SEQ ID NO: 161 - DNA, 504 bp, synthetic construct
  misc_feature 1..504: note = Synthetic
  source 1..504: mol_type = other DNA
gagcctcctgcccctcaccaggccctgttagcatcacctcgggcacctggccacagcaggggccagtcagggcaccccgggatagcacgcccaggccctgtgcaaggcctctggcacttaggagaggcttttgcccctttgtcctctgagcagaagggttggcaaagagggaaggggacaggccagttctgcacctggcctttctccagaatgaaggcctccacctcccgtccgtccccacagaaagaaaagtaaactgttttcgcggctgcgcagaaagaagaacatggtatgtgcagtgagtgctgcggaggggcgcagaggcccgcgccctggctggccctgtgcatgcgccttgcgccctgctcccaggtgctcactaacccgtaatctgctgctctgtgtgcagtgctgcccggcagggctgtcgtgtgcgtgttgggtgggaaggcggaggcggcgcggggcgggctggcctctgagcatctggctgcatttagcacg

SEQ ID NO: 162 - DNA, 505 bp, synthetic construct
  misc_feature 1..505: note = Synthetic
  source 1..505: mol_type = other DNA
gagcctcctgcccctcaccaggccctgttagcatcacctcgggcacctggccacagcaggggccagtcagggcaccccgggatagcacgcccaggccctgtgcaaggcctctggcacttaggagaggcttttgcccctttgtcctctgagcagaagggttggcaaagagggaaggggacaggccagttctgcacctggcctttctccagaatgaaggcctccacctcccgtccgtccccacagaaagaaaagtaaactgttttcgcggctgcgcagaaagaagaacatggtatgtgcagtgagtgctgcggaggggcgcagaggcccgcgccctggctggccctgtgcatgcgccttgcgccctgctcccaggtgctcactaacccgtaatctgctgctctgtgtgcatgtgctgcccggcagggctgtcgtgtgcgtgttgggtgggaaggcggaggcggcgcggggcgggctggcctctgagcatctggctgcatttagcacg

SEQ ID NO: 163 - DNA, 502 bp, synthetic construct
  misc_feature 1..502: note = Synthetic
  source 1..502: mol_type = other DNA
gagcctcctgcccctcaccaggccctgttagcatcacctcgggcacctggccacagcaggggccagtcagggcaccccgggatagcacgcccaggccctgtgcaaggcctctggcacttaggagaggcttttgcccctttgtcctctgagcagaagggttggcaaagagggaaggggacaggccagttctgcacctggcctttctccagaatgaaggcctccacctcccgtccgtccccacagaaagaaaagtaaactgttttcgcggctgcgcagaaagaagaacatggtatgtgcagtgagtgctgcggaggggcgcagaggcccgcgccctggctggccctgtgcatgctgccttgcgccctgctcccaggtgccactaacccgtaatctggctctgtgtgcagtgctgcccggcagggctgtcgtgtgcgtgttgggtgggaaggcggaggcggcgcggggcgggctggcctctgagcatctggctgcatttagcacg

SEQ ID NO: 164 - DNA, 503 bp, synthetic construct
  misc_feature 1..503: note = Synthetic
  source 1..503: mol_type = other DNA
gagcctcctgcccctcaccaggccctgttagcatcacctcgggcacctggccacagcaggggccagtcagggcaccccgggatagcacgcccaggccctgtgcaaggcctctggcacttaggagaggcttttgcccctttgtcctctgagcagaagggttggcaaagagggaaggggacaggccagttctgcacctggcctttctccagaatgaaggcctccacctcccgtccgtccccacagaaagaaaagtaaactgttttcgcggctgcgcagaaagaagaacatggtatgtgcagtgagtgctgcggaggggcgcagaggcccgcgccctggctggccctgtgcatgctgccttgcgccctgctcccaggtgccactaacccgtaatctggctctgtgtgcatgtgctgcccggcagggctgtcgtgtgcgtgttgggtgggaaggcggaggcggcgcggggcgggctggcctctgagcatctggctgcatttagcacg

SEQ ID NO: 165 - DNA, 504 bp, synthetic construct
  misc_feature 1..504: note = Synthetic
  source 1..504: mol_type = other DNA
gagcctcctgcccctcaccaggccctgttagcatcacctcgggcacctggccacagcaggggccagtcagggcaccccgggatagcacgcccaggccctgtgcaaggcctctggcacttaggagaggcttttgcccctttgtcctctgagcagaagggttggcaaagagggaaggggacaggccagttctgcacctggcctttctccagaatgaaggcctccacctcccgtccgtccccacagaaagaaaagtaaactgttttcgcggctgcgcagaaagaagaacatggtatgtgcagtgagtgctgcggaggggcgcagaggcccgcgccctggctggccctgtgcatgctgccttgcgccctgctcccaggtgccactaacccgtaatctgctgctctgtgtgcagtgctgcccggcagggctgtcgtgtgcgtgttgggtgggaaggcggaggcggcgcggggcgggctggcctctgagcatctggctgcatttagcacg

SEQ ID NO: 166 - DNA, 505 bp, synthetic construct
  misc_feature 1..505: note = Synthetic
  source 1..505: mol_type = other DNA
gagcctcctgcccctcaccaggccctgttagcatcacctcgggcacctggccacagcaggggccagtcagggcaccccgggatagcacgcccaggccctgtgcaaggcctctggcacttaggagaggcttttgcccctttgtcctctgagcagaagggttggcaaagagggaaggggacaggccagttctgcacctggcctttctccagaatgaaggcctccacctcccgtccgtccccacagaaagaaaagtaaactgttttcgcggctgcgcagaaagaagaacatggtatgtgcagtgagtgctgcggaggggcgcagaggcccgcgccctggctggccctgtgcatgctgccttgcgccctgctcccaggtgccactaacccgtaatctgctgctctgtgtgcatgtgctgcccggcagggctgtcgtgtgcgtgttgggtgggaaggcggaggcggcgcggggcgggctggcctctgagcatctggctgcatttagcacg

SEQ ID NO: 167 - DNA, 503 bp, synthetic construct
  misc_feature 1..503: note = Synthetic
  source 1..503: mol_type = other DNA
gagcctcctgcccctcaccaggccctgttagcatcacctcgggcacctggccacagcaggggccagtcagggcaccccgggatagcacgcccaggccctgtgcaaggcctctggcacttaggagaggcttttgcccctttgtcctctgagcagaagggttggcaaagagggaaggggacaggccagttctgcacctggcctttctccagaatgaaggcctccacctcccgtccgtccccacagaaagaaaagtaaactgttttcgcggctgcgcagaaagaagaacatggtatgtgcagtgagtgctgcggaggggcgcagaggcccgcgccctggctggccctgtgcatgctgccttgcgccctgctcccaggtgctcactaacccgtaatctggctctgtgtgcagtgctgcccggcagggctgtcgtgtgcgtgttgggtgggaaggcggaggcggcgcggggcgggctggcctctgagcatctggctgcatttagcacg

SEQ ID NO: 168 - DNA, 504 bp, synthetic construct
  misc_feature 1..504: note = Synthetic
  source 1..504: mol_type = other DNA
gagcctcctgcccctcaccaggccctgttagcatcacctcgggcacctggccacagcaggggccagtcagggcaccccgggatagcacgcccaggccctgtgcaaggcctctggcacttaggagaggcttttgcccctttgtcctctgagcagaagggttggcaaagagggaaggggacaggccagttctgcacctggcctttctccagaatgaaggcctccacctcccgtccgtccccacagaaagaaaagtaaactgttttcgcggctgcgcagaaagaagaacatggtatgtgcagtgagtgctgcggaggggcgcagaggcccgcgccctggctggccctgtgcatgctgccttgcgccctgctcccaggtgctcactaacccgtaatctggctctgtgtgcatgtgctgcccggcagggctgtcgtgtgcgtgttgggtgggaaggcggaggcggcgcggggcgggctggcctctgagcatctggctgcatttagcacg

SEQ ID NO: 169 - DNA, 505 bp, synthetic construct
  misc_feature 1..505: note = Synthetic
  source 1..505: mol_type = other DNA
gagcctcctgcccctcaccaggccctgttagcatcacctcgggcacctggccacagcaggggccagtcagggcaccccgggatagcacgcccaggccctgtgcaaggcctctggcacttaggagaggcttttgcccctttgtcctctgagcagaagggttggcaaagagggaaggggacaggccagttctgcacctggcctttctccagaatgaaggcctccacctcccgtccgtccccacagaaagaaaagtaaactgttttcgcggctgcgcagaaagaagaacatggtatgtgcagtgagtgctgcggaggggcgcagaggcccgcgccctggctggccctgtgcatgctgccttgcgccctgctcccaggtgctcactaacccgtaatctgctgctctgtgtgcagtgctgcccggcagggctgtcgtgtgcgtgttgggtgggaaggcggaggcggcgcggggcgggctggcctctgagcatctggctgcatttagcacg

SEQ ID NO: 170 - DNA, 506 bp, synthetic construct
  misc_feature 1..506: note = Synthetic
  source 1..506: mol_type = other DNA
gagcctcctgcccctcaccaggccctgttagcatcacctcgggcacctggccacagcaggggccagtcagggcaccccgggatagcacgcccaggccctgtgcaaggcctctggcacttaggagaggcttttgcccctttgtcctctgagcagaagggttggcaaagagggaaggggacaggccagttctgcacctggcctttctccagaatgaaggcctccacctcccgtccgtccccacagaaagaaaagtaaactgttttcgcggctgcgcagaaagaagaacatggtatgtgcagtgagtgctgcggaggggcgcagaggcccgcgccctggctggccctgtgcatgctgccttgcgccctgctcccaggtgctcactaacccgtaatctgctgctctgtgtgcatgtgctgcccggcagggctgtcgtgtgcgtgttgggtgggaaggcggaggcggcgcggggcgggctggcctctgagcatctggctgcatttagcacg

SEQ ID NO: 171 - DNA, 501 bp, synthetic construct
  misc_feature 1..501: note = Synthetic
  source 1..501: mol_type = other DNA
gagcctcctgcccctcaccaggccctgttagcatcacctcgggcacctggccacagcaggggccagtcagggcaccccgggatagcacgcccaggccctgtgcaaggcctctggcacttaggagaggcttttgcccctttgtcctctgagcagaagggttggcaaagagggaaggggacaggccagttctgcacctggcctttctccagaatgaaggcctccacctcccgtccgtccccacagaaagaaaagtaaactgttttcgcggctgcgcagaaagaagaacatggtacgagcagtgagtgctgcggaggggcgcagaggcccgcgccctggctggccctgtgcatgcgccttgcgccctgctcccaggtgccactaacccgtaatctggctctgtgtgcagtgctgcccggcagggctgtcgtgtgcgtgttgggtgggaaggcggaggcggcgcggggcgggctggcctctgagcatctggctgcatttagcacg

SEQ ID NO: 172 - DNA, 502 bp, synthetic construct
  misc_feature 1..502: note = Synthetic
  source 1..502: mol_type = other DNA
gagcctcctgcccctcaccaggccctgttagcatcacctcgggcacctggccacagcaggggccagtcagggcaccccgggatagcacgcccaggccctgtgcaaggcctctggcacttaggagaggcttttgcccctttgtcctctgagcagaagggttggcaaagagggaaggggacaggccagttctgcacctggcctttctccagaatgaaggcctccacctcccgtccgtccccacagaaagaaaagtaaactgttttcgcggctgcgcagaaagaagaacatggtacgagcagtgagtgctgcggaggggcgcagaggcccgcgccctggctggccctgtgcatgcgccttgcgccctgctcccaggtgccactaacccgtaatctggctctgtgtgcatgtgctgcccggcagggctgtcgtgtgcgtgttgggtgggaaggcggaggcggcgcggggcgggctggcctctgagcatctggctgcatttagcacg

SEQ ID NO: 173 - DNA, 503 bp, synthetic construct
  misc_feature 1..503: note = Synthetic
  source 1..503: mol_type = other DNA
gagcctcctgcccctcaccaggccctgttagcatcacctcgggcacctggccacagcaggggccagtcagggcaccccgggatagcacgcccaggccctgtgcaaggcctctggcacttaggagaggcttttgcccctttgtcctctgagcagaagggttggcaaagagggaaggggacaggccagttctgcacctggcctttctccagaatgaaggcctccacctcccgtccgtccccacagaaagaaaagtaaactgttttcgcggctgcgcagaaagaagaacatggtacgagcagtgagtgctgcggaggggcgcagaggcccgcgccctggctggccctgtgcatgcgccttgcgccctgctcccaggtgccactaacccgtaatctgctgctctgtgtgcagtgctgcccggcagggctgtcgtgtgcgtgttgggtgggaaggcggaggcggcgcggggcgggctggcctctgagcatctggctgcatttagcacg

SEQ ID NO: 174 - DNA, 504 bp, synthetic construct
  misc_feature 1..504: note = Synthetic
  source 1..504: mol_type = other DNA
gagcctcctgcccctcaccaggccctgttagcatcacctcgggcacctggccacagcaggggccagtcagggcaccccgggatagcacgcccaggccctgtgcaaggcctctggcacttaggagaggcttttgcccctttgtcctctgagcagaagggttggcaaagagggaaggggacaggccagttctgcacctggcctttctccagaatgaaggcctccacctcccgtccgtccccacagaaagaaaagtaaactgttttcgcggctgcgcagaaagaagaacatggtacgagcagtgagtgctgcggaggggcgcagaggcccgcgccctggctggccctgtgcatgcgccttgcgccctgctcccaggtgccactaacccgtaatctgctgctctgtgtgcatgtgctgcccggcagggctgtcgtgtgcgtgttgggtgggaaggcggaggcggcgcggggcgggctggcctctgagcatctggctgcatttagcacg

SEQ ID NO: 175 - DNA, 502 bp, synthetic construct
  misc_feature 1..502: note = Synthetic
  source 1..502: mol_type = other DNA
gagcctcctgcccctcaccaggccctgttagcatcacctcgggcacctggccacagcaggggccagtcagggcaccccgggatagcacgcccaggccctgtgcaaggcctctggcacttaggagaggcttttgcccctttgtcctctgagcagaagggttggcaaagagggaaggggacaggccagttctgcacctggcctttctccagaatgaaggcctccacctcccgtccgtccccacagaaagaaaagtaaactgttttcgcggctgcgcagaaagaagaacatggtacgagcagtgagtgctgcggaggggcgcagaggcccgcgccctggctggccctgtgcatgcgccttgcgccctgctcccaggtgctcactaacccgtaatctggctctgtgtgcagtgctgcccggcagggctgtcgtgtgcgtgttgggtgggaaggcggaggcggcgcggggcgggctggcctctgagcatctggctgcatttagcacg

SEQ ID NO: 176 - DNA, 503 bp, synthetic construct
  misc_feature 1..503: note = Synthetic
  source 1..503: mol_type = other DNA
gagcctcctgcccctcaccaggccctgttagcatcacctcgggcacctggccacagcaggggccagtcagggcaccccgggatagcacgcccaggccctgtgcaaggcctctggcacttaggagaggcttttgcccctttgtcctctgagcagaagggttggcaaagagggaaggggacaggccagttctgcacctggcctttctccagaatgaaggcctccacctcccgtccgtccccacagaaagaaaagtaaactgttttcgcggctgcgcagaaagaagaacatggtacgagcagtgagtgctgcggaggggcgcagaggcccgcgccctggctggccctgtgcatgcgccttgcgccctgctcccaggtgctcactaacccgtaatctggctctgtgtgcatgtgctgcccggcagggctgtcgtgtgcgtgttgggtgggaaggcggaggcggcgcggggcgggctggcctctgagcatctggctgcatttagcacg

SEQ ID NO: 177 - DNA, 504 bp, synthetic construct
  misc_feature 1..504: note = Synthetic
  source 1..504: mol_type = other DNA
gagcctcctgcccctcaccaggccctgttagcatcacctcgggcacctggccacagcaggggccagtcagggcaccccgggatagcacgcccaggccctgtgcaaggcctctggcacttaggagaggcttttgcccctttgtcctctgagcagaagggttggcaaagagggaaggggacaggccagttctgcacctggcctttctccagaatgaaggcctccacctcccgtccgtccccacagaaagaaaagtaaactgttttcgcggctgcgcagaaagaagaacatggtacgagcagtgagtgctgcggaggggcgcagaggcccgcgccctggctggccctgtgcatgcgccttgcgccctgctcccaggtgctcactaacccgtaatctgctgctctgtgtgcagtgctgcccggcagggctgtcgtgtgcgtgttgggtgggaaggcggaggcggcgcggggcgggctggcctctgagcatctggctgcatttagcacg

SEQ ID NO: 178 - DNA, 505 bp, synthetic construct
  misc_feature 1..505: note = Synthetic
  source 1..505: mol_type = other DNA
gagcctcctgcccctcaccaggccctgttagcatcacctcgggcacctggccacagcaggggccagtcagggcaccccgggatagcacgcccaggccctgtgcaaggcctctggcacttaggagaggcttttgcccctttgtcctctgagcagaagggttggcaaagagggaaggggacaggccagttctgcacctggcctttctccagaatgaaggcctccacctcccgtccgtccccacagaaagaaaagtaaactgttttcgcggctgcgcagaaagaagaacatggtacgagcagtgagtgctgcggaggggcgcagaggcccgcgccctggctggccctgtgcatgcgccttgcgccctgctcccaggtgctcactaacccgtaatctgctgctctgtgtgcatgtgctgcccggcagggctgtcgtgtgcgtgttgggtgggaaggcggaggcggcgcggggcgggctggcctctgagcatctggctgcatttagcacg

SEQ ID NO: 179 - DNA, 502 bp, synthetic construct
  misc_feature 1..502: note = Synthetic
  source 1..502: mol_type = other DNA
gagcctcctgcccctcaccaggccctgttagcatcacctcgggcacctggccacagcaggggccagtcagggcaccccgggatagcacgcccaggccctgtgcaaggcctctggcacttaggagaggcttttgcccctttgtcctctgagcagaagggttggcaaagagggaaggggacaggccagttctgcacctggcctttctccagaatgaaggcctccacctcccgtccgtccccacagaaagaaaagtaaactgttttcgcggctgcgcagaaagaagaacatggtacgagcagtgagtgctgcggaggggcgcagaggcccgcgccctggctggccctgtgcatgctgccttgcgccctgctcccaggtgccactaacccgtaatctggctctgtgtgcagtgctgcccggcagggctgtcgtgtgcgtgttgggtgggaaggcggaggcggcgcggggcgggctggcctctgagcatctggctgcatttagcacg

SEQ ID NO: 180 - DNA, 503 bp, synthetic construct
  misc_feature 1..503: note = Synthetic
  source 1..503: mol_type = other DNA
gagcctcctgcccctcaccaggccctgttagcatcacctcgggcacctggccacagcaggggccagtcagggcaccccgggatagcacgcccaggccctgtgcaaggcctctggcacttaggagaggcttttgcccctttgtcctctgagcagaagggttggcaaagagggaaggggacaggccagttctgcacctggcctttctccagaatgaaggcctccacctcccgtccgtccccacagaaagaaaagtaaactgttttcgcggctgcgcagaaagaagaacatggtacgagcagtgagtgctgcggaggggcgcagaggcccgcgccctggctggccctgtgcatgctgccttgcgccctgctcccaggtgccactaacccgtaatctggctctgtgtgcatgtgctgcccggcagggctgtcgtgtgcgtgttgggtgggaaggcggaggcggcgcggggcgggctggcctctgagcatctggctgcatttagcacg

SEQ ID NO: 181 - DNA, 504 bp, synthetic construct
  misc_feature 1..504: note = Synthetic
  source 1..504: mol_type = other DNA
gagcctcctgcccctcaccaggccctgttagcatcacctcgggcacctggccacagcaggggccagtcagggcaccccgggatagcacgcccaggccctgtgcaaggcctctggcacttaggagaggcttttgcccctttgtcctctgagcagaagggttggcaaagagggaaggggacaggccagttctgcacctggcctttctccagaatgaaggcctccacctcccgtccgtccccacagaaagaaaagtaaactgttttcgcggctgcgcagaaagaagaacatggtacgagcagtgagtgctgcggaggggcgcagaggcccgcgccctggctggccctgtgcatgctgccttgcgccctgctcccaggtgccactaacccgtaatctgctgctctgtgtgcagtgctgcccggcagggctgtcgtgtgcgtgttgggtgggaaggcggaggcggcgcggggcgggctggcctctgagcatctggctgcatttagcacg

SEQ ID NO: 182 - DNA, 505 bp, synthetic construct
  misc_feature 1..505: note = Synthetic
  source 1..505: mol_type = other DNA
gagcctcctgcccctcaccaggccctgttagcatcacctcgggcacctggccacagcaggggccagtcagggcaccccgggatagcacgcccaggccctgtgcaaggcctctggcacttaggagaggcttttgcccctttgtcctctgagcagaagggttggcaaagagggaaggggacaggccagttctgcacctggcctttctccagaatgaaggcctccacctcccgtccgtccccacagaaagaaaagtaaactgttttcgcggctgcgcagaaagaagaacatggtacgagcagtgagtgctgcggaggggcgcagaggcccgcgccctggctggccctgtgcatgctgccttgcgccctgctcccaggtgccactaacccgtaatctgctgctctgtgtgcatgtgctgcccggcagggctgtcgtgtgcgtgttgggtgggaaggcggaggcggcgcggggcgggctggcctctgagcatctggctgcatttagcacg

SEQ ID NO: 183 - DNA, 503 bp, synthetic construct
  misc_feature 1..503: note = Synthetic
  source 1..503: mol_type = other DNA
gagcctcctgcccctcaccaggccctgttagcatcacctcgggcacctggccacagcaggggccagtcagggcaccccgggatagcacgcccaggccctgtgcaaggcctctggcacttaggagaggcttttgcccctttgtcctctgagcagaagggttggcaaagagggaaggggacaggccagttctgcacctggcctttctccagaatgaaggcctccacctcccgtccgtccccacagaaagaaaagtaaactgttttcgcggctgcgcagaaagaagaacatggtacgagcagtgagtgctgcggaggggcgcagaggcccgcgccctggctggccctgtgcatgctgccttgcgccctgctcccaggtgctcactaacccgtaatctggctctgtgtgcagtgctgcccggcagggctgtcgtgtgcgtgttgggtgggaaggcggaggcggcgcggggcgggctggcctctgagcatctggctgcatttagcacg

SEQ ID NO: 184 - DNA, 504 bp, synthetic construct
  misc_feature 1..504: note = Synthetic
  source 1..504: mol_type = other DNA
gagcctcctgcccctcaccaggccctgttagcatcacctcgggcacctggccacagcaggggccagtcagggcaccccgggatagcacgcccaggccctgtgcaaggcctctggcacttaggagaggcttttgcccctttgtcctctgagcagaagggttggcaaagagggaaggggacaggccagttctgcacctggcctttctccagaatgaaggcctccacctcccgtccgtccccacagaaagaaaagtaaactgttttcgcggctgcgcagaaagaagaacatggtacgagcagtgagtgctgcggaggggcgcagaggcccgcgccctggctggccctgtgcatgctgccttgcgccctgctcccaggtgctcactaacccgtaatctggctctgtgtgcatgtgctgcccggcagggctgtcgtgtgcgtgttgggtgggaaggcggaggcggcgcggggcgggctggcctctgagcatctggctgcatttagcacg

SEQ ID NO: 185 - DNA, 505 bp, synthetic construct
  misc_feature 1..505: note = Synthetic
  source 1..505: mol_type = other DNA
gagcctcctgcccctcaccaggccctgttagcatcacctcgggcacctggccacagcaggggccagtcagggcaccccgggatagcacgcccaggccctgtgcaaggcctctggcacttaggagaggcttttgcccctttgtcctctgagcagaagggttggcaaagagggaaggggacaggccagttctgcacctggcctttctccagaatgaaggcctccacctcccgtccgtccccacagaaagaaaagtaaactgttttcgcggctgcgcagaaagaagaacatggtacgagcagtgagtgctgcggaggggcgcagaggcccgcgccctggctggccctgtgcatgctgccttgcgccctgctcccaggtgctcactaacccgtaatctgctgctctgtgtgcagtgctgcccggcagggctgtcgtgtgcgtgttgggtgggaaggcggaggcggcgcggggcgggctggcctctgagcatctggctgcatttagcacg

SEQ ID NO: 186 - DNA, 506 bp, synthetic construct
  misc_feature 1..506: note = Synthetic
  source 1..506: mol_type = other DNA
gagcctcctgcccctcaccaggccctgttagcatcacctcgggcacctggccacagcaggggccagtcagggcaccccgggatagcacgcccaggccctgtgcaaggcctctggcacttaggagaggcttttgcccctttgtcctctgagcagaagggttggcaaagagggaaggggacaggccagttctgcacctggcctttctccagaatgaaggcctccacctcccgtccgtccccacagaaagaaaagtaaactgttttcgcggctgcgcagaaagaagaacatggtacgagcagtgagtgctgcggaggggcgcagaggcccgcgccctggctggccctgtgcatgctgccttgcgccctgctcccaggtgctcactaacccgtaatctgctgctctgtgtgcatgtgctgcccggcagggctgtcgtgtgcgtgttgggtgggaaggcggaggcggcgcggggcgggctggcctctgagcatctggctgcatttagcacg

SEQ ID NO: 187 - DNA, 501 bp, synthetic construct
  misc_feature 1..501: note = Synthetic
  source 1..501: mol_type = other DNA
gagcctcctgcccctcaccaggccctgttagcatcacctcgggcacctggccacagcaggggccagtcagggcaccccgggatagcacgcccaggccctgtgcaaggcctctggcacttaggagaggcttttgcccctttgtcctctgagcagaagggttggcaaagagggaaggggacaggccagttctgcacctggcctttctccagaatgaaggcctccacctcccgtccgtccccacagaaagaaaagtaaactgttttcgcggctgcgcagaaagaagaacatggttcgtgcagtgagtgctgcggaggggcgcagaggcccgcgccctggctggccctgtgcatgcgccttgcgccctgctcccaggtgccactaacccgtaatctggctctgtgtgcagtgctgcccggcagggctgtcgtgtgcgtgttgggtgggaaggcggaggcggcgcggggcgggctggcctctgagcatctggctgcatttagcacg

SEQ ID NO: 188 - DNA, 502 bp, synthetic construct
  misc_feature 1..502: note = Synthetic
  source 1..502: mol_type = other DNA
gagcctcctgcccctcaccaggccctgttagcatcacctcgggcacctggccacagcaggggccagtcagggcaccccgggatagcacgcccaggccctgtgcaaggcctctggcacttaggagaggcttttgcccctttgtcctctgagcagaagggttggcaaagagggaaggggacaggccagttctgcacctggcctttctccagaatgaaggcctccacctcccgtccgtccccacagaaagaaaagtaaactgttttcgcggctgcgcagaaagaagaacatggttcgtgcagtgagtgctgcggaggggcgcagaggcccgcgccctggctggccctgtgcatgcgccttgcgccctgctcccaggtgccactaacccgtaatctggctctgtgtgcatgtgctgcccggcagggctgtcgtgtgcgtgttgggtgggaaggcggaggcggcgcggggcgggctggcctctgagcatctggctgcatttagcacg

SEQ ID NO: 189 - DNA, 503 bp, synthetic construct
  misc_feature 1..503: note = Synthetic
  source 1..503: mol_type = other DNA
gagcctcctgcccctcaccaggccctgttagcatcacctcgggcacctggccacagcaggggccagtcagggcaccccgggatagcacgcccaggccctgtgcaaggcctctggcacttaggagaggcttttgcccctttgtcctctgagcagaagggttggcaaagagggaaggggacaggccagttctgcacctggcctttctccagaatgaaggcctccacctcccgtccgtccccacagaaagaaaagtaaactgttttcgcggctgcgcagaaagaagaacatggttcgtgcagtgagtgctgcggaggggcgcagaggcccgcgccctggctggccctgtgcatgcgccttgcgccctgctcccaggtgccactaacccgtaatctgctgctctgtgtgcagtgctgcccggcagggctgtcgtgtgcgtgttgggtgggaaggcggaggcggcgcggggcgggctggcctctgagcatctggctgcatttagcacg

SEQ ID NO: 190 - DNA, 504 bp, synthetic construct
  misc_feature 1..504: note = Synthetic
  source 1..504: mol_type = other DNA
gagcctcctgcccctcaccaggccctgttagcatcacctcgggcacctggccacagcaggggccagtcagggcaccccgggatagcacgcccaggccctgtgcaaggcctctggcacttaggagaggcttttgcccctttgtcctctgagcagaagggttggcaaagagggaaggggacaggccagttctgcacctggcctttctccagaatgaaggcctccacctcccgtccgtccccacagaaagaaaagtaaactgttttcgcggctgcgcagaaagaagaacatggttcgtgcagtgagtgctgcggaggggcgcagaggcccgcgccctggctggccctgtgcatgcgccttgcgccctgctcccaggtgccactaacccgtaatctgctgctctgtgtgcatgtgctgcccggcagggctgtcgtgtgcgtgttgggtgggaaggcggaggcggcgcggggcgggctggcctctgagcatctggctgcatttagcacg

SEQ ID NO: 191 - DNA, 502 bp, synthetic construct
  misc_feature 1..502: note = Synthetic
  source 1..502: mol_type = other DNA
gagcctcctgcccctcaccaggccctgttagcatcacctcgggcacctggccacagcaggggccagtcagggcaccccgggatagcacgcccaggccctgtgcaaggcctctggcacttaggagaggcttttgcccctttgtcctctgagcagaagggttggcaaagagggaaggggacaggccagttctgcacctggcctttctccagaatgaaggcctccacctcccgtccgtccccacagaaagaaaagtaaactgttttcgcggctgcgcagaaagaagaacatggttcgtgcagtgagtgctgcggaggggcgcagaggcccgcgccctggctggccctgtgcatgcgccttgcgccctgctcccaggtgctcactaacccgtaatctggctctgtgtgcagtgctgcccggcagggctgtcgtgtgcgtgttgggtgggaaggcggaggcggcgcggggcgggctggcctctgagcatctggctgcatttagcacg

SEQ ID NO: 192 - DNA, 503 bp, synthetic construct
  misc_feature 1..503: note = Synthetic
  source 1..503: mol_type = other DNA
gagcctcctgcccctcaccaggccctgttagcatcacctcgggcacctggccacagcaggggccagtcagggcaccccgggatagcacgcccaggccctgtgcaaggcctctggcacttaggagaggcttttgcccctttgtcctctgagcagaagggttggcaaagagggaaggggacaggccagttctgcacctggcctttctccagaatgaaggcctccacctcccgtccgtccccacagaaagaaaagtaaactgttttcgcggctgcgcagaaagaagaacatggttcgtgcagtgagtgctgcggaggggcgcagaggcccgcgccctggctggccctgtgcatgcgccttgcgccctgctcccaggtgctcactaacccgtaatctggctctgtgtgcatgtgctgcccggcagggctgtcgtgtgcgtgttgggtgggaaggcggaggcggcgcggggcgggctggcctctgagcatctggctgcatttagcacg

SEQ ID NO: 193 - DNA, 504 bp, synthetic construct
  misc_feature 1..504: note = Synthetic
  source 1..504: mol_type = other DNA
gagcctcctgcccctcaccaggccctgttagcatcacctcgggcacctggccacagcaggggccagtcagggcaccccgggatagcacgcccaggccctgtgcaaggcctctggcacttaggagaggcttttgcccctttgtcctctgagcagaagggttggcaaagagggaaggggacaggccagttctgcacctggcctttctccagaatgaaggcctccacctcccgtccgtccccacagaaagaaaagtaaactgttttcgcggctgcgcagaaagaagaacatggttcgtgcagtgagtgctgcggaggggcgcagaggcccgcgccctggctggccctgtgcatgcgccttgcgccctgctcccaggtgctcactaacccgtaatctgctgctctgtgtgcagtgctgcccggcagggctgtcgtgtgcgtgttgggtgggaaggcggaggcggcgcggggcgggctggcctctgagcatctggctgcatttagcacg

SEQ ID NO: 194 - DNA, 505 bp, synthetic construct
  misc_feature 1..505: note = Synthetic
  source 1..505: mol_type = other DNA
gagcctcctgcccctcaccaggccctgttagcatcacctcgggcacctggccacagcaggggccagtcagggcaccccgggatagcacgcccaggccctgtgcaaggcctctggcacttaggagaggcttttgcccctttgtcctctgagcagaagggttggcaaagagggaaggggacaggccagttctgcacctggcctttctccagaatgaaggcctccacctcccgtccgtccccacagaaagaaaagtaaactgttttcgcggctgcgcagaaagaagaacatggttcgtgcagtgagtgctgcggaggggcgcagaggcccgcgccctggctggccctgtgcatgcgccttgcgccctgctcccaggtgctcactaacccgtaatctgctgctctgtgtgcatgtgctgcccggcagggctgtcgtgtgcgtgttgggtgggaaggcggaggcggcgcggggcgggctggcctctgagcatctggctgcatttagcacg

SEQ ID NO: 195 - DNA, 502 bp, synthetic construct
  misc_feature 1..502: note = Synthetic
  source 1..502: mol_type = other DNA
gagcctcctgcccctcaccaggccctgttagcatcacctcgggcacctggccacagcaggggccagtcagggcaccccgggatagcacgcccaggccctgtgcaaggcctctggcacttaggagaggcttttgcccctttgtcctctgagcagaagggttggcaaagagggaaggggacaggccagttctgcacctggcctttctccagaatgaaggcctccacctcccgtccgtccccacagaaagaaaagtaaactgttttcgcggctgcgcagaaagaagaacatggttcgtgcagtgagtgctgcggaggggcgcagaggcccgcgccctggctggccctgtgcatgctgccttgcgccctgctcccaggtgccactaacccgtaatctggctctgtgtgcagtgctgcccggcagggctgtcgtgtgcgtgttgggtgggaaggcggaggcggcgcggggcgggctggcctctgagcatctggctgcatttagcacg

SEQ ID NO: 196 - DNA, 503 bp, synthetic construct
  misc_feature 1..503: note = Synthetic
  source 1..503: mol_type = other DNA
gagcctcctgcccctcaccaggccctgttagcatcacctcgggcacctggccacagcaggggccagtcagggcaccccgggatagcacgcccaggccctgtgcaaggcctctggcacttaggagaggcttttgcccctttgtcctctgagcagaagggttggcaaagagggaaggggacaggccagttctgcacctggcctttctccagaatgaaggcctccacctcccgtccgtccccacagaaagaaaagtaaactgttttcgcggctgcgcagaaagaagaacatggttcgtgcagtgagtgctgcggaggggcgcagaggcccgcgccctggctggccctgtgcatgctgccttgcgccctgctcccaggtgccactaacccgtaatctggctctgtgtgcatgtgctgcccggcagggctgtcgtgtgcgtgttgggtgggaaggcggaggcggcgcggggcgggctggcctctgagcatctggctgcatttagcacg

SEQ ID NO: 197 - DNA, 504 bp, synthetic construct
  misc_feature 1..504: note = Synthetic
  source 1..504: mol_type = other DNA
gagcctcctgcccctcaccaggccctgttagcatcacctcgggcacctggccacagcaggggccagtcagggcaccccgggatagcacgcccaggccctgtgcaaggcctctggcacttaggagaggcttttgcccctttgtcctctgagcagaagggttggcaaagagggaaggggacaggccagttctgcacctggcctttctccagaatgaaggcctccacctcccgtccgtccccacagaaagaaaagtaaactgttttcgcggctgcgcagaaagaagaacatggttcgtgcagtgagtgctgcggaggggcgcagaggcccgcgccctggctggccctgtgcatgctgccttgcgccctgctcccaggtgccactaacccgtaatctgctgctctgtgtgcagtgctgcccggcagggctgtcgtgtgcgtgttgggtgggaaggcggaggcggcgcggggcgggctggcctctgagcatctggctgcatttagcacg

SEQ ID NO: 198 - DNA, 505 bp, synthetic construct
  misc_feature 1..505: note = Synthetic
  source 1..505: mol_type = other DNA
gagcctcctgcccctcaccaggccctgttagcatcacctcgggcacctggccacagcaggggccagtcagggcaccccgggatagcacgcccaggccctgtgcaaggcctctggcacttaggagaggcttttgcccctttgtcctctgagcagaagggttggcaaagagggaaggggacaggccagttctgcacctggcctttctccagaatgaaggcctccacctcccgtccgtccccacagaaagaaaagtaaactgttttcgcggctgcgcagaaagaagaacatggttcgtgcagtgagtgctgcggaggggcgcagaggcccgcgccctggctggccctgtgcatgctgccttgcgccctgctcccaggtgccactaacccgtaatctgctgctctgtgtgcatgtgctgcccggcagggctgtcgtgtgcgtgttgggtgggaaggcggaggcggcgcggggcgggctggcctctgagcatctggctgcatttagcacg

SEQ ID NO: 199 - DNA, 503 bp, synthetic construct
  misc_feature 1..503: note = Synthetic
  source 1..503: mol_type = other DNA
gagcctcctgcccctcaccaggccctgttagcatcacctcgggcacctggccacagcaggggccagtcagggcaccccgggatagcacgcccaggccctgtgcaaggcctctggcacttaggagaggcttttgcccctttgtcctctgagcagaagggttggcaaagagggaaggggacaggccagttctgcacctggcctttctccagaatgaaggcctccacctcccgtccgtccccacagaaagaaaagtaaactgttttcgcggctgcgcagaaagaagaacatggttcgtgcagtgagtgctgcggaggggcgcagaggcccgcgccctggctggccctgtgcatgctgccttgcgccctgctcccaggtgctcactaacccgtaatctggctctgtgtgcagtgctgcccggcagggctgtcgtgtgcgtgttgggtgggaaggcggaggcggcgcggggcgggctggcctctgagcatctggctgcatttagcacg

SEQ ID NO: 200 - DNA, 504 bp, synthetic construct
  misc_feature 1..504: note = Synthetic
  source 1..504: mol_type = other DNA
gagcctcctgcccctcaccaggccctgttagcatcacctcgggcacctggccacagcaggggccagtcagggcaccccgggatagcacgcccaggccctgtgcaaggcctctggcacttaggagaggcttttgcccctttgtcctctgagcagaagggttggcaaagagggaaggggacaggccagttctgcacctggcctttctccagaatgaaggcctccacctcccgtccgtccccacagaaagaaaagtaaactgttttcgcggctgcgcagaaagaagaacatggttcgtgcagtgagtgctgcggaggggcgcagaggcccgcgccctggctggccctgtgcatgctgccttgcgccctgctcccaggtgctcactaacccgtaatctggctctgtgtgcatgtgctgcccggcagggctgtcgtgtgcgtgttgggtgggaaggcggaggcggcgcggggcgggctggcctctgagcatctggctgcatttagcacg

SEQ ID NO: 201 - DNA, 505 bp, synthetic construct
  misc_feature 1..505: note = Synthetic
  source 1..505: mol_type = other DNA
gagcctcctgcccctcaccaggccctgttagcatcacctcgggcacctggccacagcaggggccagtcagggcaccccgggatagcacgcccaggccctgtgcaaggcctctggcacttaggagaggcttttgcccctttgtcctctgagcagaagggttggcaaagagggaaggggacaggccagttctgcacctggcctttctccagaatgaaggcctccacctcccgtccgtccccacagaaagaaaagtaaactgttttcgcggctgcgcagaaagaagaacatggttcgtgcagtgagtgctgcggaggggcgcagaggcccgcgccctggctggccctgtgcatgctgccttgcgccctgctcccaggtgctcactaacccgtaatctgctgctctgtgtgcagtgctgcccggcagggctgtcgtgtgcgtgttgggtgggaaggcggaggcggcgcggggcgggctggcctctgagcatctggctgcatttagcacg

SEQ ID NO: 202 - DNA, 506 bp, synthetic construct
  misc_feature 1..506: note = Synthetic
  source 1..506: mol_type = other DNA
gagcctcctgcccctcaccaggccctgttagcatcacctcgggcacctggccacagcaggggccagtcagggcaccccgggatagcacgcccaggccctgtgcaaggcctctggcacttaggagaggcttttgcccctttgtcctctgagcagaagggttggcaaagagggaaggggacaggccagttctgcacctggcctttctccagaatgaaggcctccacctcccgtccgtccccacagaaagaaaagtaaactgttttcgcggctgcgcagaaagaagaacatggttcgtgcagtgagtgctgcggaggggcgcagaggcccgcgccctggctggccctgtgcatgctgccttgcgccctgctcccaggtgctcactaacccgtaatctgctgctctgtgtgcatgtgctgcccggcagggctgtcgtgtgcgtgttgggtgggaaggcggaggcggcgcggggcgggctggcctctgagcatctggctgcatttagcacg

SEQ ID NO: 203 - DNA, 501 bp, synthetic construct
  misc_feature 1..501: note = Synthetic
  source 1..501: mol_type = other DNA
gagcctcctgcccctcaccaggccctgttagcatcacctcgggcacctggccacagcaggggccagtcagggcaccccgggatagcacgcccaggccctgtgcaaggcctctggcacttaggagaggcttttgcccctttgtcctctgagcagaagggttggcaaagagggaaggggacaggccagttctgcacctggcctttctccagaatgaaggcctccaccacccgtccttccccacagaaagaaaagtaaactgttttcgcggctgcgcagaaagaagaacatggtacgtgcagtgagtgctgcggaggggcgcagaggcccgcgccctggctggccctgtgcatgcgccttgcgccctgctcccaggtgccactaacccgtaatctggctctgtgtgcagtgctgcccggcagggctgtcgtgtgcgtgttgggtgggaaggcggaggcggcgcggggcgggctggcctctgagcatctggctgcatttagcacg

SEQ ID NO: 204 - DNA, 502 bp, synthetic construct
  misc_feature 1..502: note = Synthetic
  source 1..502: mol_type = other DNA
gagcctcctgcccctcaccaggccctgttagcatcacctcgggcacctggccacagcaggggccagtcagggcaccccgggatagcacgcccaggccctgtgcaaggcctctggcacttaggagaggcttttgcccctttgtcctctgagcagaagggttggcaaagagggaaggggacaggccagttctgcacctggcctttctccagaatgaaggcctccaccacccgtccttccccacagaaagaaaagtaaactgttttcgcggctgcgcagaaagaagaacatggtacgtgcagtgagtgctgcggaggggcgcagaggcccgcgccctggctggccctgtgcatgcgccttgcgccctgctcccaggtgccactaacccgtaatctggctctgtgtgcatgtgctgcccggcagggctgtcgtgtgcgtgttgggtgggaaggcggaggcggcgcggggcgggctggcctctgagcatctggctgcatttagcacg

SEQ ID NO: 205 - DNA, 503 bp, synthetic construct
  misc_feature 1..503: note = Synthetic
  source 1..503: mol_type = other DNA
gagcctcctgcccctcaccaggccctgttagcatcacctcgggcacctggccacagcaggggccagtcagggcaccccgggatagcacgcccaggccctgtgcaaggcctctggcacttaggagaggcttttgcccctttgtcctctgagcagaagggttggcaaagagggaaggggacaggccagttctgcacctggcctttctccagaatgaaggcctccaccacccgtccttccccacagaaagaaaagtaaactgttttcgcggctgcgcagaaagaagaacatggtacgtgcagtgagtgctgcggaggggcgcagaggcccgcgccctggctggccctgtgcatgcgccttgcgccctgctcccaggtgccactaacccgtaatctgctgctctgtgtgcagtgctgcccggcagggctgtcgtgtgcgtgttgggtgggaaggcggaggcggcgcggggcgggctggcctctgagcatctggctgcatttagcacg

SEQ ID NO: 206 - DNA, 504 bp, synthetic construct
  misc_feature 1..504: note = Synthetic
  source 1..504: mol_type = other DNA
gagcctcctgcccctcaccaggccctgttagcatcacctcgggcacctggccacagcaggggccagtcagggcaccccgggatagcacgcccaggccctgtgcaaggcctctggcacttaggagaggcttttgcccctttgtcctctgagcagaagggttggcaaagagggaaggggacaggccagttctgcacctggcctttctccagaatgaaggcctccaccacccgtccttccccacagaaagaaaagtaaactgttttcgcggctgcgcagaaagaagaacatggtacgtgcagtgagtgctgcggaggggcgcagaggcccgcgccctggctggccctgtgcatgcgccttgcgccctgctcccaggtgccactaacccgtaatctgctgctctgtgtgcatgtgctgcccggcagggctgtcgtgtgcgtgttgggtgggaaggcggaggcggcgcggggcgggctggcctctgagcatctggctgcatttagcacg

SEQ ID NO: 207 - DNA, 502 bp, synthetic construct
  misc_feature 1..502: note = Synthetic
  source 1..502: mol_type = other DNA
gagcctcctgcccctcaccaggccctgttagcatcacctcgggcacctggccacagcaggggccagtcagggcaccccgggatagcacgcccaggccctgtgcaaggcctctggcacttaggagaggcttttgcccctttgtcctctgagcagaagggttggcaaagagggaaggggacaggccagttctgcacctggcctttctccagaatgaaggcctccaccacccgtccttccccacagaaagaaaagtaaactgttttcgcggctgcgcagaaagaagaacatggtacgtgcagtgagtgctgcggaggggcgcagaggcccgcgccctggctggccctgtgcatgcgccttgcgccctgctcccaggtgctcactaacccgtaatctggctctgtgtgcagtgctgcccggcagggctgtcgtgtgcgtgttgggtgggaaggcggaggcggcgcggggcgggctggcctctgagcatctggctgcatttagcacg

SEQ ID NO: 208 - DNA, 503 bp, synthetic construct
  misc_feature 1..503: note = Synthetic
  source 1..503: mol_type = other DNA
gagcctcctgcccctcaccaggccctgttagcatcacctcgggcacctggccacagcaggggccagtcagggcaccccgggatagcacgcccaggccctgtgcaaggcctctggcacttaggagaggcttttgcccctttgtcctctgagcagaagggttggcaaagagggaaggggacaggccagttctgcacctggcctttctccagaatgaaggcctccaccacccgtccttccccacagaaagaaaagtaaactgttttcgcggctgcgcagaaagaagaacatggtacgtgcagtgagtgctgcggaggggcgcagaggcccgcgccctggctggccctgtgcatgcgccttgcgccctgctcccaggtgctcactaacccgtaatctggctctgtgtgcatgtgctgcccggcagggctgtcgtgtgcgtgttgggtgggaaggcggaggcggcgcggggcgggctggcctctgagcatctggctgcatttagcacg

SEQ ID NO: 209 - DNA, 504 bp, synthetic construct
  misc_feature 1..504: note = Synthetic
  source 1..504: mol_type = other DNA
gagcctcctgcccctcaccaggccctgttagcatcacctcgggcacctggccacagcaggggccagtcagggcaccccgggatagcacgcccaggccctgtgcaaggcctctggcacttaggagaggcttttgcccctttgtcctctgagcagaagggttggcaaagagggaaggggacaggccagttctgcacctggcctttctccagaatgaaggcctccaccacccgtccttccccacagaaagaaaagtaaactgttttcgcggctgcgcagaaagaagaacatggtacgtgcagtgagtgctgcggaggggcgcagaggcccgcgccctggctggccctgtgcatgcgccttgcgccctgctcccaggtgctcactaacccgtaatctgctgctctgtgtgcagtgctgcccggcagggctgtcgtgtgcgtgttgggtgggaaggcggaggcggcgcggggcgggctggcctctgagcatctggctgcatttagcacg

SEQ ID NO: 210 - DNA, 505 bp, synthetic construct
  misc_feature 1..505: note = Synthetic
  source 1..505: mol_type = other DNA
gagcctcctgcccctcaccaggccctgttagcatcacctcgggcacctggccacagcaggggccagtcagggcaccccgggatagcacgcccaggccctgtgcaaggcctctggcacttaggagaggcttttgcccctttgtcctctgagcagaagggttggcaaagagggaaggggacaggccagttctgcacctggcctttctccagaatgaaggcctccaccacccgtccttccccacagaaagaaaagtaaactgttttcgcggctgcgcagaaagaagaacatggtacgtgcagtgagtgctgcggaggggcgcagaggcccgcgccctggctggccctgtgcatgcgccttgcgccctgctcccaggtgctcactaacccgtaatctgctgctctgtgtgcatgtgctgcccggcagggctgtcgtgtgcgtgttgggtgggaaggcggaggcggcgcggggcgggctggcctctgagcatctggctgcatttagcacg

SEQ ID NO: 211 - DNA, 502 bp, synthetic construct
  misc_feature 1..502: note = Synthetic
  source 1..502: mol_type = other DNA
gagcctcctgcccctcaccaggccctgttagcatcacctcgggcacctggccacagcaggggccagtcagggcaccccgggatagcacgcccaggccctgtgcaaggcctctggcacttaggagaggcttttgcccctttgtcctctgagcagaagggttggcaaagagggaaggggacaggccagttctgcacctggcctttctccagaatgaaggcctccaccacccgtccttccccacagaaagaaaagtaaactgttttcgcggctgcgcagaaagaagaacatggtacgtgcagtgagtgctgcggaggggcgcagaggcccgcgccctggctggccctgtgcatgctgccttgcgccctgctcccaggtgccactaacccgtaatctggctctgtgtgcagtgctgcccggcagggctgtcgtgtgcgtgttgggtgggaaggcggaggcggcgcggggcgggctggcctctgagcatctggctgcatttagcacg

SEQ ID NO: 212 - DNA, 503 bp, synthetic construct
  misc_feature 1..503: note = Synthetic
  source 1..503: mol_type = other DNA
gagcctcctgcccctcaccaggccctgttagcatcacctcgggcacctggccacagcaggggccagtcagggcaccccgggatagcacgcccaggccctgtgcaaggcctctggcacttaggagaggcttttgcccctttgtcctctgagcagaagggttggcaaagagggaaggggacaggccagttctgcacctggcctttctccagaatgaaggcctccaccacccgtccttccccacagaaagaaaagtaaactgttttcgcggctgcgcagaaagaagaacatggtacgtgcagtgagtgctgcggaggggcgcagaggcccgcgccctggctggccctgtgcatgctgccttgcgccctgctcccaggtgccactaacccgtaatctggctctgtgtgcatgtgctgcccggcagggctgtcgtgtgcgtgttgggtgggaaggcggaggcggcgcggggcgggctggcctctgagcatctggctgcatttagcacg

SEQ ID NO: 213 - DNA, 504 bp, synthetic construct
  misc_feature 1..504: note = Synthetic
  source 1..504: mol_type = other DNA
gagcctcctgcccctcaccaggccctgttagcatcacctcgggcacctggccacagcaggggccagtcagggcaccccgggatagcacgcccaggccctgtgcaaggcctctggcacttaggagaggcttttgcccctttgtcctctgagcagaagggttggcaaagagggaaggggacaggccagttctgcacctggcctttctccagaatgaaggcctccaccacccgtccttccccacagaaagaaaagtaaactgttttcgcggctgcgcagaaagaagaacatggtacgtgcagtgagtgctgcggaggggcgcagaggcccgcgccctggctggccctgtgcatgctgccttgcgccctgctcccaggtgccactaacccgtaatctgctgctctgtgtgcagtgctgcccggcagggctgtcgtgtgcgtgttgggtgggaaggcggaggcggcgcggggcgggctggcctctgagcatctggctgcatttagcacg

SEQ ID NO: 214 - DNA, 505 bp, synthetic construct
  misc_feature 1..505: note = Synthetic
  source 1..505: mol_type = other DNA
gagcctcctgcccctcaccaggccctgttagcatcacctcgggcacctggccacagcaggggccagtcagggcaccccgggatagcacgcccaggccctgtgcaaggcctctggcacttaggagaggcttttgcccctttgtcctctgagcagaagggttggcaaagagggaaggggacaggccagttctgcacctggcctttctccagaatgaaggcctccaccacccgtccttccccacagaaagaaaagtaaactgttttcgcggctgcgcagaaagaagaacatggtacgtgcagtgagtgctgcggaggggcgcagaggcccgcgccctggctggccctgtgcatgctgccttgcgccctgctcccaggtgccactaacccgtaatctgctgctctgtgtgcatgtgctgcccggcagggctgtcgtgtgcgtgttgggtgggaaggcggaggcggcgcggggcgggctggcctctgagcatctggctgcatttagcacg

SEQ ID NO: 215 - DNA, 503 bp, synthetic construct
  misc_feature 1..503: note = Synthetic
  source 1..503: mol_type = other DNA
gagcctcctgcccctcaccaggccctgttagcatcacctcgggcacctggccacagcaggggccagtcagggcaccccgggatagcacgcccaggccctgtgcaaggcctctggcacttaggagaggcttttgcccctttgtcctctgagcagaagggttggcaaagagggaaggggacaggccagttctgcacctggcctttctccagaatgaaggcctccaccacccgtccttccccacagaaagaaaagtaaactgttttcgcggctgcgcagaaagaagaacatggtacgtgcagtgagtgctgcggaggggcgcagaggcccgcgccctggctggccctgtgcatgctgccttgcgccctgctcccaggtgctcactaacccgtaatctggctctgtgtgcagtgctgcccggcagggctgtcgtgtgcgtgttgggtgggaaggcggaggcggcgcggggcgggctggcctctgagcatctggctgcatttagcacg

SEQ ID NO: 216 - DNA, 504 bp, synthetic construct
  misc_feature 1..504: note = Synthetic
  source 1..504: mol_type = other DNA
gagcctcctgcccctcaccaggccctgttagcatcacctcgggcacctggccacagcaggggccagtcagggcaccccgggatagcacgcccaggccctgtgcaaggcctctggcacttaggagaggcttttgcccctttgtcctctgagcagaagggttggcaaagagggaaggggacaggccagttctgcacctggcctttctccagaatgaaggcctccaccacccgtccttccccacagaaagaaaagtaaactgttttcgcggctgcgcagaaagaagaacatggtacgtgcagtgagtgctgcggaggggcgcagaggcccgcgccctggctggccctgtgcatgctgccttgcgccctgctcccaggtgctcactaacccgtaatctggctctgtgtgcatgtgctgcccggcagggctgtcgtgtgcgtgttgggtgggaaggcggaggcggcgcggggcgggctggcctctgagcatctggctgcatttagcacg

SEQ ID NO: 217 - DNA, 505 bp, synthetic construct
  misc_feature 1..505: note = Synthetic
  source 1..505: mol_type = other DNA
gagcctcctgcccctcaccaggccctgttagcatcacctcgggcacctggccacagcaggggccagtcagggcaccccgggatagcacgcccaggccctgtgcaaggcctctggcacttaggagaggcttttgcccctttgtcctctgagcagaagggttggcaaagagggaaggggacaggccagttctgcacctggcctttctccagaatgaaggcctccaccacccgtccttccccacagaaagaaaagtaaactgttttcgcggctgcgcagaaagaagaacatggtacgtgcagtgagtgctgcggaggggcgcagaggcccgcgccctggctggccctgtgcatgctgccttgcgccctgctcccaggtgctcactaacccgtaatctgctgctctgtgtgcagtgctgcccggcagggctgtcgtgtgcgtgttgggtgggaaggcggaggcggcgcggggcgggctggcctctgagcatctggctgcatttagcacg

SEQ ID NO: 218 - DNA, 506 bp, synthetic construct
  misc_feature 1..506: note = Synthetic
  source 1..506: mol_type = other DNA
gagcctcctgcccctcaccaggccctgttagcatcacctcgggcacctggccacagcaggggccagtcagggcaccccgggatagcacgcccaggccctgtgcaaggcctctggcacttaggagaggcttttgcccctttgtcctctgagcagaagggttggcaaagagggaaggggacaggccagttctgcacctggcctttctccagaatgaaggcctccaccacccgtccttccccacagaaagaaaagtaaactgttttcgcggctgcgcagaaagaagaacatggtacgtgcagtgagtgctgcggaggggcgcagaggcccgcgccctggctggccctgtgcatgctgccttgcgccctgctcccaggtgctcactaacccgtaatctgctgctctgtgtgcatgtgctgcccggcagggctgtcgtgtgcgtgttgggtgggaaggcggaggcggcgcggggcgggctggcctctgagcatctggctgcatttagcacg

SEQ ID NO: 219 - DNA, 501 bp, synthetic construct
  misc_feature 1..501: note = Synthetic
  source 1..501: mol_type = other DNA
gagcctcctgcccctcaccaggccctgttagcatcacctcgggcacctggccacagcaggggccagtcagggcaccccgggatagcacgcccaggccctgtgcaaggcctctggcacttaggagaggcttttgcccctttgtcctctgagcagaagggttggcaaagagggaaggggacaggccagttctgcacctggcctttctccagaatgaaggcctccaccacccgtccttccccacagaaagaaaagtaaactgttttcgcggctgcgcagaaagaagaacatggtaagtgcagtgagtgctgcggaggggcgcagaggcccgcgccctggctggccctgtgcatgcgccttgcgccctgctcccaggtgccactaacccgtaatctggctctgtgtgcagtgctgcccggcagggctgtcgtgtgcgtgttgggtgggaaggcggaggcggcgcggggcgggctggcctctgagcatctggctgcatttagcacg

SEQ ID NO: 220 - DNA, 502 bp, synthetic construct
  misc_feature 1..502: note = Synthetic
  source 1..502: mol_type = other DNA
gagcctcctgcccctcaccaggccctgttagcatcacctcgggcacctggccacagcaggggccagtcagggcaccccgggatagcacgcccaggccctgtgcaaggcctctggcacttaggagaggcttttgcccctttgtcctctgagcagaagggttggcaaagagggaaggggacaggccagttctgcacctggcctttctccagaatgaaggcctccaccacccgtccttccccacagaaagaaaagtaaactgttttcgcggctgcgcagaaagaagaacatggtaagtgcagtgagtgctgcggaggggcgcagaggcccgcgccctggctggccctgtgcatgcgccttgcgccctgctcccaggtgccactaacccgtaatctggctctgtgtgcatgtgctgcccggcagggctgtcgtgtgcgtgttgggtgggaaggcggaggcggcgcggggcgggctggcctctgagcatctggctgcatttagcacg

SEQ ID NO: 221 - DNA, 503 bp, synthetic construct
  misc_feature 1..503: note = Synthetic
  source 1..503: mol_type = other DNA
gagcctcctgcccctcaccaggccctgttagcatcacctcgggcacctggccacagcaggggccagtcagggcaccccgggatagcacgcccaggccctgtgcaaggcctctggcacttaggagaggcttttgcccctttgtcctctgagcagaagggttggcaaagagggaaggggacaggccagttctgcacctggcctttctccagaatgaaggcctccaccacccgtccttccccacagaaagaaaagtaaactgttttcgcggctgcgcagaaagaagaacatggtaagtgcagtgagtgctgcggaggggcgcagaggcccgcgccctggctggccctgtgcatgcgccttgcgccctgctcccaggtgccactaacccgtaatctgctgctctgtgtgcagtgctgcccggcagggctgtcgtgtgcgtgttgggtgggaaggcggaggcggcgcggggcgggctggcctctgagcatctggctgcatttagcacg

SEQ ID NO: 222 - DNA, 504 bp, synthetic construct
  misc_feature 1..504: note = Synthetic
  source 1..504: mol_type = other DNA
gagcctcctgcccctcaccaggccctgttagcatcacctcgggcacctggccacagcaggggccagtcagggcaccccgggatagcacgcccaggccctgtgcaaggcctctggcacttaggagaggcttttgcccctttgtcctctgagcagaagggttggcaaagagggaaggggacaggccagttctgcacctggcctttctccagaatgaaggcctccaccacccgtccttccccacagaaagaaaagtaaactgttttcgcggctgcgcagaaagaagaacatggtaagtgcagtgagtgctgcggaggggcgcagaggcccgcgccctggctggccctgtgcatgcgccttgcgccctgctcccaggtgccactaacccgtaatctgctgctctgtgtgcatgtgctgcccggcagggctgtcgtgtgcgtgttgggtgggaaggcggaggcggcgcggggcgggctggcctctgagcatctggctgcatttagcacg

SEQ ID NO: 223 - DNA, 502 bp, synthetic construct
  misc_feature 1..502: note = Synthetic
  source 1..502: mol_type = other DNA
gagcctcctgcccctcaccaggccctgttagcatcacctcgggcacctggccacagcaggggccagtcagggcaccccgggatagcacgcccaggccctgtgcaaggcctctggcacttaggagaggcttttgcccctttgtcctctgagcagaagggttggcaaagagggaaggggacaggccagttctgcacctggcctttctccagaatgaaggcctccaccacccgtccttccccacagaaagaaaagtaaactgttttcgcggctgcgcagaaagaagaacatggtaagtgcagtgagtgctgcggaggggcgcagaggcccgcgccctggctggccctgtgcatgcgccttgcgccctgctcccaggtgctcactaacccgtaatctggctctgtgtgcagtgctgcccggcagggctgtcgtgtgcgtgttgggtgggaaggcggaggcggcgcggggcgggctggcctctgagcatctggctgcatttagcacg

SEQ ID NO: 224 - DNA, 503 bp, synthetic construct
  misc_feature 1..503: note = Synthetic
  source 1..503: mol_type = other DNA
gagcctcctgcccctcaccaggccctgttagcatcacctcgggcacctggccacagcaggggccagtcagggcaccccgggatagcacgcccaggccctgtgcaaggcctctggcacttaggagaggcttttgcccctttgtcctctgagcagaagggttggcaaagagggaaggggacaggccagttctgcacctggcctttctccagaatgaaggcctccaccacccgtccttccccacagaaagaaaagtaaactgttttcgcggctgcgcagaaagaagaacatggtaagtgcagtgagtgctgcggaggggcgcagaggcccgcgccctggctggccctgtgcatgcgccttgcgccctgctcccaggtgctcactaacccgtaatctggctctgtgtgcatgtgctgcccggcagggctgtcgtgtgcgtgttgggtgggaaggcggaggcggcgcggggcgggctggcctctgagcatctggctgcatttagcacg

SEQ ID NO: 225 - DNA, 504 bp, synthetic construct
  misc_feature 1..504: note = Synthetic
  source 1..504: mol_type = other DNA
gagcctcctgcccctcaccaggccctgttagcatcacctcgggcacctggccacagcaggggccagtcagggcaccccgggatagcacgcccaggccctgtgcaaggcctctggcacttaggagaggcttttgcccctttgtcctctgagcagaagggttggcaaagagggaaggggacaggccagttctgcacctggcctttctccagaatgaaggcctccaccacccgtccttccccacagaaagaaaagtaaactgttttcgcggctgcgcagaaagaagaacatggtaagtgcagtgagtgctgcggaggggcgcagaggcccgcgccctggctggccctgtgcatgcgccttgcgccctgctcccaggtgctcactaacccgtaatctgctgctctgtgtgcagtgctgcccggcagggctgtcgtgtgcgtgttgggtgggaaggcggaggcggcgcggggcgggctggcctctgagcatctggctgcatttagcacg

SEQ ID NO: 226 - DNA, 505 bp, synthetic construct
  misc_feature 1..505: note = Synthetic
  source 1..505: mol_type = other DNA
gagcctcctgcccctcaccaggccctgttagcatcacctcgggcacctggccacagcaggggccagtcagggcaccccgggatagcacgcccaggccctgtgcaaggcctctggcacttaggagaggcttttgcccctttgtcctctgagcagaagggttggcaaagagggaaggggacaggccagttctgcacctggcctttctccagaatgaaggcctccaccacccgtccttccccacagaaagaaaagtaaactgttttcgcggctgcgcagaaagaagaacatggtaagtgcagtgagtgctgcggaggggcgcagaggcccgcgccctggctggccctgtgcatgcgccttgcgccctgctcccaggtgctcactaacccgtaatctgctgctctgtgtgcatgtgctgcccggcagggctgtcgtgtgcgtgttgggtgggaaggcggaggcggcgcggggcgggctggcctctgagcatctggctgcatttagcacg

SEQ ID NO: 227 - DNA, 502 bp, synthetic construct
  misc_feature 1..502: note = Synthetic
  source 1..502: mol_type = other DNA
gagcctcctgcccctcaccaggccctgttagcatcacctcgggcacctggccacagcaggggccagtcagggcaccccgggatagcacgcccaggccctgtgcaaggcctctggcacttaggagaggcttttgcccctttgtcctctgagcagaagggttggcaaagagggaaggggacaggccagttctgcacctggcctttctccagaatgaaggcctccaccacccgtccttccccacagaaagaaaagtaaactgttttcgcggctgcgcagaaagaagaacatggtaagtgcagtgagtgctgcggaggggcgcagaggcccgcgccctggctggccctgtgcatgctgccttgcgccctgctcccaggtgccactaacccgtaatctggctctgtgtgcagtgctgcccggcagggctgtcgtgtgcgtgttgggtgggaaggcggaggcggcgcggggcgggctggcctctgagcatctggctgcatttagcacg

SEQ ID NO: 228 - DNA, 503 bp, synthetic construct
  misc_feature 1..503: note = Synthetic
  source 1..503: mol_type = other DNA
gagcctcctgcccctcaccaggccctgttagcatcacctcgggcacctggccacagcaggggccagtcagggcaccccgggatagcacgcccaggccctgtgcaaggcctctggcacttaggagaggcttttgcccctttgtcctctgagcagaagggttggcaaagagggaaggggacaggccagttctgcacctggcctttctccagaatgaaggcctccaccacccgtccttccccacagaaagaaaagtaaactgttttcgcggctgcgcagaaagaagaacatggtaagtgcagtgagtgctgcggaggggcgcagaggcccgcgccctggctggccctgtgcatgctgccttgcgccctgctcccaggtgccactaacccgtaatctggctctgtgtgcatgtgctgcccggcagggctgtcgtgtgcgtgttgggtgggaaggcggaggcggcgcggggcgggctggcctctgagcatctggctgcatttagcacg

SEQ ID NO: 229 - DNA, 504 bp, synthetic construct
  misc_feature 1..504: note = Synthetic
  source 1..504: mol_type = other DNA
gagcctcctgcccctcaccaggccctgttagcatcacctcgggcacctggccacagcaggggccagtcagggcaccccgggatagcacgcccaggccctgtgcaaggcctctggcacttaggagaggcttttgcccctttgtcctctgagcagaagggttggcaaagagggaaggggacaggccagttctgcacctggcctttctccagaatgaaggcctccaccacccgtccttccccacagaaagaaaagtaaactgttttcgcggctgcgcagaaagaagaacatggtaagtgcagtgagtgctgcggaggggcgcagaggcccgcgccctggctggccctgtgcatgctgccttgcgccctgctcccaggtgccactaacccgtaatctgctgctctgtgtgcagtgctgcccggcagggctgtcgtgtgcgtgttgggtgggaaggcggaggcggcgcggggcgggctggcctctgagcatctggctgcatttagcacg

SEQ ID NO: 230 - DNA, 505 bp, synthetic construct
  misc_feature 1..505: note = Synthetic
  source 1..505: mol_type = other DNA
gagcctcctgcccctcaccaggccctgttagcatcacctcgggcacctggccacagcaggggccagtcagggcaccccgggatagcacgcccaggccctgtgcaaggcctctggcacttaggagaggcttttgcccctttgtcctctgagcagaagggttggcaaagagggaaggggacaggccagttctgcacctggcctttctccagaatgaaggcctccaccacccgtccttccccacagaaagaaaagtaaactgttttcgcggctgcgcagaaagaagaacatggtaagtgcagtgagtgctgcggaggggcgcagaggcccgcgccctggctggccctgtgcatgctgccttgcgccctgctcccaggtgccactaacccgtaatctgctgctctgtgtgcatgtgctgcccggcagggctgtcgtgtgcgtgttgggtgggaaggcggaggcggcgcggggcgggctggcctctgagcatctggctgcatttagcacg

SEQ ID NO: 231 - DNA, 503 bp, synthetic construct
  misc_feature 1..503: note = Synthetic
  source 1..503: mol_type = other DNA
gagcctcctgcccctcaccaggccctgttagcatcacctcgggcacctggccacagcaggggccagtcagggcaccccgggatagcacgcccaggccctgtgcaaggcctctggcacttaggagaggcttttgcccctttgtcctctgagcagaagggttggcaaagagggaaggggacaggccagttctgcacctggcctttctccagaatgaaggcctccaccacccgtccttccccacagaaagaaaagtaaactgttttcgcggctgcgcagaaagaagaacatggtaagtgcagtgagtgctgcggaggggcgcagaggcccgcgccctggctggccctgtgcatgctgccttgcgccctgctcccaggtgctcactaacccgtaatctggctctgtgtgcagtgctgcccggcagggctgtcgtgtgcgtgttgggtgggaaggcggaggcggcgcggggcgggctggcctctgagcatctggctgcatttagcacg

SEQ ID NO: 232 - DNA, 504 bp, synthetic construct
  misc_feature 1..504: note = Synthetic
  source 1..504: mol_type = other DNA
gagcctcctgcccctcaccaggccctgttagcatcacctcgggcacctggccacagcaggggccagtcagggcaccccgggatagcacgcccaggccctgtgcaaggcctctggcacttaggagaggcttttgcccctttgtcctctgagcagaagggttggcaaagagggaaggggacaggccagttctgcacctggcctttctccagaatgaaggcctccaccacccgtccttccccacagaaagaaaagtaaactgttttcgcggctgcgcagaaagaagaacatggtaagtgcagtgagtgctgcggaggggcgcagaggcccgcgccctggctggccctgtgcatgctgccttgcgccctgctcccaggtgctcactaacccgtaatctggctctgtgtgcatgtgctgcccggcagggctgtcgtgtgcgtgttgggtgggaaggcggaggcggcgcggggcgggctggcctctgagcatctggctgcatttagcacg

SEQ ID NO: 233 - DNA, 505 bp, synthetic construct
  misc_feature 1..505: note = Synthetic
  source 1..505: mol_type = other DNA
gagcctcctgcccctcaccaggccctgttagcatcacctcgggcacctggccacagcaggggccagtcagggcaccccgggatagcacgcccaggccctgtgcaaggcctctggcacttaggagaggcttttgcccctttgtcctctgagcagaagggttggcaaagagggaaggggacaggccagttctgcacctggcctttctccagaatgaaggcctccaccacccgtccttccccacagaaagaaaagtaaactgttttcgcggctgcgcagaaagaagaacatggtaagtgcagtgagtgctgcggaggggcgcagaggcccgcgccctggctggccctgtgcatgctgccttgcgccctgctcccaggtgctcactaacccgtaatctgctgctctgtgtgcagtgctgcccggcagggctgtcgtgtgcgtgttgggtgggaaggcggaggcggcgcggggcgggctggcctctgagcatctggctgcatttagcacg

SEQ ID NO: 234 - DNA, 506 bp, synthetic construct
  misc_feature 1..506: note = Synthetic
  source 1..506: mol_type = other DNA
gagcctcctgcccctcaccaggccctgttagcatcacctcgggcacctggccacagcaggggccagtcagggcaccccgggatagcacgcccaggccctgtgcaaggcctctggcacttaggagaggcttttgcccctttgtcctctgagcagaagggttggcaaagagggaaggggacaggccagttctgcacctggcctttctccagaatgaaggcctccaccacccgtccttccccacagaaagaaaagtaaactgttttcgcggctgcgcagaaagaagaacatggtaagtgcagtgagtgctgcggaggggcgcagaggcccgcgccctggctggccctgtgcatgctgccttgcgccctgctcccaggtgctcactaacccgtaatctgctgctctgtgtgcatgtgctgcccggcagggctgtcgtgtgcgtgttgggtgggaaggcggaggcggcgcggggcgggctggcctctgagcatctggctgcatttagcacg

SEQ ID NO: 235 - DNA, 501 bp, synthetic construct
  misc_feature 1..501: note = Synthetic
  source 1..501: mol_type = other DNA
gagcctcctgcccctcaccaggccctgttagcatcacctcgggcacctggccacagcaggggccagtcagggcaccccgggatagcacgcccaggccctgtgcaaggcctctggcacttaggagaggcttttgcccctttgtcctctgagcagaagggttggcaaagagggaaggggacaggccagttctgcacctggcctttctccagaatgaaggcctccaccacccgtccttccccacagaaagaaaagtaaactgttttcgcggctgcgcagaaagaagaacatggtaggtgcagtgagtgctgcggaggggcgcagaggcccgcgccctggctggccctgtgcatgcgccttgcgccctgctcccaggtgccactaacccgtaatctggctctgtgtgcagtgctgcccggcagggctgtcgtgtgcgtgttgggtgggaaggcggaggcggcgcggggcgggctggcctctgagcatctggctgcatttagcacg

SEQ ID NO: 236 - DNA, 502 bp, synthetic construct
  misc_feature 1..502: note = Synthetic
  source 1..502: mol_type = other DNA
gagcctcctgcccctcaccaggccctgttagcatcacctcgggcacctggccacagcaggggccagtcagggcaccccgggatagcacgcccaggccctgtgcaaggcctctggcacttaggagaggcttttgcccctttgtcctctgagcagaagggttggcaaagagggaaggggacaggccagttctgcacctggcctttctccagaatgaaggcctccaccacccgtccttccccacagaaagaaaagtaaactgttttcgcggctgcgcagaaagaagaacatggtaggtgcagtgagtgctgcggaggggcgcagaggcccgcgccctggctggccctgtgcatgcgccttgcgccctgctcccaggtgccactaacccgtaatctggctctgtgtgcatgtgctgcccggcagggctgtcgtgtgcgtgttgggtgggaaggcggaggcggcgcggggcgggctggcctctgagcatctggctgcatttagcacg

SEQ ID NO: 237 - DNA, 503 bp, synthetic construct
  misc_feature 1..503: note = Synthetic
  source 1..503: mol_type = other DNA
gagcctcctgcccctcaccaggccctgttagcatcacctcgggcacctggccacagcaggggccagtcagggcaccccgggatagcacgcccaggccctgtgcaaggcctctggcacttaggagaggcttttgcccctttgtcctctgagcagaagggttggcaaagagggaaggggacaggccagttctgcacctggcctttctccagaatgaaggcctccaccacccgtccttccccacagaaagaaaagtaaactgttttcgcggctgcgcagaaagaagaacatggtaggtgcagtgagtgctgcggaggggcgcagaggcccgcgccctggctggccctgtgcatgcgccttgcgccctgctcccaggtgccactaacccgtaatctgctgctctgtgtgcagtgctgcccggcagggctgtcgtgtgcgtgttgggtgggaaggcggaggcggcgcggggcgggctggcctctgagcatctggctgcatttagcacg

SEQ ID NO: 238 - DNA, 504 bp, synthetic construct
  misc_feature 1..504: note = Synthetic
  source 1..504: mol_type = other DNA
gagcctcctgcccctcaccaggccctgttagcatcacctcgggcacctggccacagcaggggccagtcagggcaccccgggatagcacgcccaggccctgtgcaaggcctctggcacttaggagaggcttttgcccctttgtcctctgagcagaagggttggcaaagagggaaggggacaggccagttctgcacctggcctttctccagaatgaaggcctccaccacccgtccttccccacagaaagaaaagtaaactgttttcgcggctgcgcagaaagaagaacatggtaggtgcagtgagtgctgcggaggggcgcagaggcccgcgccctggctggccctgtgcatgcgccttgcgccctgctcccaggtgccactaacccgtaatctgctgctctgtgtgcatgtgctgcccggcagggctgtcgtgtgcgtgttgggtgggaaggcggaggcggcgcggggcgggctggcctctgagcatctggctgcatttagcacg

SEQ ID NO: 239 - DNA, 502 bp, synthetic construct
  misc_feature 1..502: note = Synthetic
  source 1..502: mol_type = other DNA
gagcctcctgcccctcaccaggccctgttagcatcacctcgggcacctggccacagcaggggccagtcagggcaccccgggatagcacgcccaggccctgtgcaaggcctctggcacttaggagaggcttttgcccctttgtcctctgagcagaagggttggcaaagagggaaggggacaggccagttctgcacctggcctttctccagaatgaaggcctccaccacccgtccttccccacagaaagaaaagtaaactgttttcgcggctgcgcagaaagaagaacatggtaggtgcagtgagtgctgcggaggggcgcagaggcccgcgccctggctggccctgtgcatgcgccttgcgccctgctcccaggtgctcactaacccgtaatctggctctgtgtgcagtgctgcccggcagggctgtcgtgtgcgtgttgggtgggaaggcggaggcggcgcggggcgggctggcctctgagcatctggctgcatttagcacg

SEQ ID NO: 240 - DNA, 503 bp, synthetic construct
  misc_feature 1..503: note = Synthetic
  source 1..503: mol_type = other DNA
gagcctcctgcccctcaccaggccctgttagcatcacctcgggcacctggccacagcaggggccagtcagggcaccccgggatagcacgcccaggccctgtgcaaggcctctggcacttaggagaggcttttgcccctttgtcctctgagcagaagggttggcaaagagggaaggggacaggccagttctgcacctggcctttctccagaatgaaggcctccaccacccgtccttccccacagaaagaaaagtaaactgttttcgcggctgcgcagaaagaagaacatggtaggtgcagtgagtgctgcggaggggcgcagaggcccgcgccctggctggccctgtgcatgcgccttgcgccctgctcccaggtgctcactaacccgtaatctggctctgtgtgcatgtgctgcccggcagggctgtcgtgtgcgtgttgggtgggaaggcggaggcggcgcggggcgggctggcctctgagcatctggctgcatttagcacg

SEQ ID NO: 241 - DNA, 504 bp, synthetic construct
  misc_feature 1..504: note = Synthetic
  source 1..504: mol_type = other DNA
gagcctcctgcccctcaccaggccctgttagcatcacctcgggcacctggccacagcaggggccagtcagggcaccccgggatagcacgcccaggccctgtgcaaggcctctggcacttaggagaggcttttgcccctttgtcctctgagcagaagggttggcaaagagggaaggggacaggccagttctgcacctggcctttctccagaatgaaggcctccaccacccgtccttccccacagaaagaaaagtaaactgttttcgcggctgcgcagaaagaagaacatggtaggtgcagtgagtgctgcggaggggcgcagaggcccgcgccctggctggccctgtgcatgcgccttgcgccctgctcccaggtgctcactaacccgtaatctgctgctctgtgtgcagtgctgcccggcagggctgtcgtgtgcgtgttgggtgggaaggcggaggcggcgcggggcgggctggcctctgagcatctggctgcatttagcacg

SEQ ID NO: 242 - DNA, 505 bp, synthetic construct
  misc_feature 1..505: note = Synthetic
  source 1..505: mol_type = other DNA
gagcctcctgcccctcaccaggccctgttagcatcacctcgggcacctggccacagcaggggccagtcagggcaccccgggatagcacgcccaggccctgtgcaaggcctctggcacttaggagaggcttttgcccctttgtcctctgagcagaagggttggcaaagagggaaggggacaggccagttctgcacctggcctttctccagaatgaaggcctccaccacccgtccttccccacagaaagaaaagtaaactgttttcgcggctgcgcagaaagaagaacatggtaggtgcagtgagtgctgcggaggggcgcagaggcccgcgccctggctggccctgtgcatgcgccttgcgccctgctcccaggtgctcactaacccgtaatctgctgctctgtgtgcatgtgctgcccggcagggctgtcgtgtgcgtgttgggtgggaaggcggaggcggcgcggggcgggctggcctctgagcatctggctgcatttagcacg

SEQ ID NO: 243 - DNA, 502 bp, synthetic construct
  misc_feature 1..502: note = Synthetic
  source 1..502: mol_type = other DNA
gagcctcctgcccctcaccaggccctgttagcatcacctcgggcacctggccacagcaggggccagtcagggcaccccgggatagcacgcccaggccctgtgcaaggcctctggcacttaggagaggcttttgcccctttgtcctctgagcagaagggttggcaaagagggaaggggacaggccagttctgcacctggcctttctccagaatgaaggcctccaccacccgtccttccccacagaaagaaaagtaaactgttttcgcggctgcgcagaaagaagaacatggtaggtgcagtgagtgctgcggaggggcgcagaggcccgcgccctggctggccctgtgcatgctgccttgcgccctgctcccaggtgccactaacccgtaatctggctctgtgtgcagtgctgcccggcagggctgtcgtgtgcgtgttgggtgggaaggcggaggcggcgcggggcgggctggcctctgagcatctggctgcatttagcacg

SEQ ID NO: 244 - DNA, 503 bp, synthetic construct
  misc_feature 1..503: note = Synthetic
  source 1..503: mol_type = other DNA
gagcctcctgcccctcaccaggccctgttagcatcacctcgggcacctggccacagcaggggccagtcagggcaccccgggatagcacgcccaggccctgtgcaaggcctctggcacttaggagaggcttttgcccctttgtcctctgagcagaagggttggcaaagagggaaggggacaggccagttctgcacctggcctttctccagaatgaaggcctccaccacccgtccttccccacagaaagaaaagtaaactgttttcgcggctgcgcagaaagaagaacatggtaggtgcagtgagtgctgcggaggggcgcagaggcccgcgccctggctggccctgtgcatgctgccttgcgccctgctcccaggtgccactaacccgtaatctggctctgtgtgcatgtgctgcccggcagggctgtcgtgtgcgtgttgggtgggaaggcggaggcggcgcggggcgggctggcctctgagcatctggctgcatttagcacg

SEQ ID NO: 245 - DNA, 504 bp, synthetic construct
  misc_feature 1..504: note = Synthetic
  source 1..504: mol_type = other DNA
gagcctcctgcccctcaccaggccctgttagcatcacctcgggcacctggccacagcaggggccagtcagggcaccccgggatagcacgcccaggccctgtgcaaggcctctggcacttaggagaggcttttgcccctttgtcctctgagcagaagggttggcaaagagggaaggggacaggccagttctgcacctggcctttctccagaatgaaggcctccaccacccgtccttccccacagaaagaaaagtaaactgttttcgcggctgcgcagaaagaagaacatggtaggtgcagtgagtgctgcggaggggcgcagaggcccgcgccctggctggccctgtgcatgctgccttgcgccctgctcccaggtgccactaacccgtaatctgctgctctgtgtgcagtgctgcccggcagggctgtcgtgtgcgtgttgggtgggaaggcggaggcggcgcggggcgggctggcctctgagcatctggctgcatttagcacg

SEQ ID NO: 246 - DNA, 505 bp, synthetic construct
  misc_feature 1..505: note = Synthetic
  source 1..505: mol_type = other DNA
gagcctcctgcccctcaccaggccctgttagcatcacctcgggcacctggccacagcaggggccagtcagggcaccccgggatagcacgcccaggccctgtgcaaggcctctggcacttaggagaggcttttgcccctttgtcctctgagcagaagggttggcaaagagggaaggggacaggccagttctgcacctggcctttctccagaatgaaggcctccaccacccgtccttccccacagaaagaaaagtaaactgttttcgcggctgcgcagaaagaagaacatggtaggtgcagtgagtgctgcggaggggcgcagaggcccgcgccctggctggccctgtgcatgctgccttgcgccctgctcccaggtgccactaacccgtaatctgctgctctgtgtgcatgtgctgcccggcagggctgtcgtgtgcgtgttgggtgggaaggcggaggcggcgcggggcgggctggcctctgagcatctggctgcatttagcacg

SEQ ID NO: 247 - DNA, 503 bp, synthetic construct
  misc_feature 1..503: note = Synthetic
  source 1..503: mol_type = other DNA
gagcctcctgcccctcaccaggccctgttagcatcacctcgggcacctggccacagcaggggccagtcagggcaccccgggatagcacgcccaggccctgtgcaaggcctctggcacttaggagaggcttttgcccctttgtcctctgagcagaagggttggcaaagagggaaggggacaggccagttctgcacctggcctttctccagaatgaaggcctccaccacccgtccttccccacagaaagaaaagtaaactgttttcgcggctgcgcagaaagaagaacatggtaggtgcagtgagtgctgcggaggggcgcagaggcccgcgccctggctggccctgtgcatgctgccttgcgccctgctcccaggtgctcactaacccgtaatctggctctgtgtgcagtgctgcccggcagggctgtcgtgtgcgtgttgggtgggaaggcggaggcggcgcggggcgggctggcctctgagcatctggctgcatttagcacg

SEQ ID NO: 248 - DNA, 504 bp, synthetic construct
  misc_feature 1..504: note = Synthetic
  source 1..504: mol_type = other DNA
gagcctcctgcccctcaccaggccctgttagcatcacctcgggcacctggccacagcaggggccagtcagggcaccccgggatagcacgcccaggccctgtgcaaggcctctggcacttaggagaggcttttgcccctttgtcctctgagcagaagggttggcaaagagggaaggggacaggccagttctgcacctggcctttctccagaatgaaggcctccaccacccgtccttccccacagaaagaaaagtaaactgttttcgcggctgcgcagaaagaagaacatggtaggtgcagtgagtgctgcggaggggcgcagaggcccgcgccctggctggccctgtgcatgctgccttgcgccctgctcccaggtgctcactaacccgtaatctggctctgtgtgcatgtgctgcccggcagggctgtcgtgtgcgtgttgggtgggaaggcggaggcggcgcggggcgggctggcctctgagcatctggctgcatttagcacg

SEQ ID NO: 249 - DNA, 505 bp, synthetic construct
  misc_feature 1..505: note = Synthetic
  source 1..505: mol_type = other DNA
gagcctcctgcccctcaccaggccctgttagcatcacctcgggcacctggccacagcaggggccagtcagggcaccccgggatagcacgcccaggccctgtgcaaggcctctggcacttaggagaggcttttgcccctttgtcctctgagcagaagggttggcaaagagggaaggggacaggccagttctgcacctggcctttctccagaatgaaggcctccaccacccgtccttccccacagaaagaaaagtaaactgttttcgcggctgcgcagaaagaagaacatggtaggtgcagtgagtgctgcggaggggcgcagaggcccgcgccctggctggccctgtgcatgctgccttgcgccctgctcccaggtgctcactaacccgtaatctgctgctctgtgtgcagtgctgcccggcagggctgtcgtgtgcgtgttgggtgggaaggcggaggcggcgcggggcgggctggcctctgagcatctggctgcatttagcacg

SEQ ID NO: 250 - DNA, 506 bp, synthetic construct
  misc_feature 1..506: note = Synthetic
  source 1..506: mol_type = other DNA
gagcctcctgcccctcaccaggccctgttagcatcacctcgggcacctggccacagcaggggccagtcagggcaccccgggatagcacgcccaggccctgtgcaaggcctctggcacttaggagaggcttttgcccctttgtcctctgagcagaagggttggcaaagagggaaggggacaggccagttctgcacctggcctttctccagaatgaaggcctccaccacccgtccttccccacagaaagaaaagtaaactgttttcgcggctgcgcagaaagaagaacatggtaggtgcagtgagtgctgcggaggggcgcagaggcccgcgccctggctggccctgtgcatgctgccttgcgccctgctcccaggtgctcactaacccgtaatctgctgctctgtgtgcatgtgctgcccggcagggctgtcgtgtgcgtgttgggtgggaaggcggaggcggcgcggggcgggctggcctctgagcatctggctgcatttagcacg

SEQ ID NO: 251 - DNA, 501 bp, synthetic construct
  misc_feature 1..501: note = Synthetic
  source 1..501: mol_type = other DNA
gagcctcctgcccctcaccaggccctgttagcatcacctcgggcacctggccacagcaggggccagtcagggcaccccgggatagcacgcccaggccctgtgcaaggcctctggcacttaggagaggcttttgcccctttgtcctctgagcagaagggttggcaaagagggaaggggacaggccagttctgcacctggcctttctccagaatgaaggcctccaccacccgtccttccccacagaaagaaaagtaaactgttttcgcggctgcgcagaaagaagaacatggtatgtgcagtgagtgctgcggaggggcgcagaggcccgcgccctggctggccctgtgcatgcgccttgcgccctgctcccaggtgccactaacccgtaatctggctctgtgtgcagtgctgcccggcagggctgtcgtgtgcgtgttgggtgggaaggcggaggcggcgcggggcgggctggcctctgagcatctggctgcatttagcacg

SEQ ID NO: 252 - DNA, 502 bp, synthetic construct
  misc_feature 1..502: note = Synthetic
  source 1..502: mol_type = other DNA
gagcctcctgcccctcaccaggccctgttagcatcacctcgggcacctggccacagcaggggccagtcagggcaccccgggatagcacgcccaggccctgtgcaaggcctctggcacttaggagaggcttttgcccctttgtcctctgagcagaagggttggcaaagagggaaggggacaggccagttctgcacctggcctttctccagaatgaaggcctccaccacccgtccttccccacagaaagaaaagtaaactgttttcgcggctgcgcagaaagaagaacatggtatgtgcagtgagtgctgcggaggggcgcagaggcccgcgccctggctggccctgtgcatgcgccttgcgccctgctcccaggtgccactaacccgtaatctggctctgtgtgcatgtgctgcccggcagggctgtcgtgtgcgtgttgggtgggaaggcggaggcggcgcggggcgggctggcctctgagcatctggctgcatttagcacg

SEQ ID NO: 253 - DNA, 503 bp, synthetic construct
  misc_feature 1..503: note = Synthetic
  source 1..503: mol_type = other DNA
gagcctcctgcccctcaccaggccctgttagcatcacctcgggcacctggccacagcaggggccagtcagggcaccccgggatagcacgcccaggccctgtgcaaggcctctggcacttaggagaggcttttgcccctttgtcctctgagcagaagggttggcaaagagggaaggggacaggccagttctgcacctggcctttctccagaatgaaggcctccaccacccgtccttccccacagaaagaaaagtaaactgttttcgcggctgcgcagaaagaagaacatggtatgtgcagtgagtgctgcggaggggcgcagaggcccgcgccctggctggccctgtgcatgcgccttgcgccctgctcccaggtgccactaacccgtaatctgctgctctgtgtgcagtgctgcccggcagggctgtcgtgtgcgtgttgggtgggaaggcggaggcggcgcggggcgggctggcctctgagcatctggctgcatttagcacg

SEQ ID NO: 254 - DNA, 504 bp, synthetic construct
  misc_feature 1..504: note = Synthetic
  source 1..504: mol_type = other DNA
gagcctcctgcccctcaccaggccctgttagcatcacctcgggcacctggccacagcaggggccagtcagggcaccccgggatagcacgcccaggccctgtgcaaggcctctggcacttaggagaggcttttgcccctttgtcctctgagcagaagggttggcaaagagggaaggggacaggccagttctgcacctggcctttctccagaatgaaggcctccaccacccgtccttccccacagaaagaaaagtaaactgttttcgcggctgcgcagaaagaagaacatggtatgtgcagtgagtgctgcggaggggcgcagaggcccgcgccctggctggccctgtgcatgcgccttgcgccctgctcccaggtgccactaacccgtaatctgctgctctgtgtgcatgtgctgcccggcagggctgtcgtgtgcgtgttgggtgggaaggcggaggcggcgcggggcgggctggcctctgagcatctggctgcatttagcacg

SEQ ID NO: 255 - DNA, 502 bp, synthetic construct
  misc_feature 1..502: note = Synthetic
  source 1..502: mol_type = other DNA
gagcctcctgcccctcaccaggccctgttagcatcacctcgggcacctggccacagcaggggccagtcagggcaccccgggatagcacgcccaggccctgtgcaaggcctctggcacttaggagaggcttttgcccctttgtcctctgagcagaagggttggcaaagagggaaggggacaggccagttctgcacctggcctttctccagaatgaaggcctccaccacccgtccttccccacagaaagaaaagtaaactgttttcgcggctgcgcagaaagaagaacatggtatgtgcagtgagtgctgcggaggggcgcagaggcccgcgccctggctggccctgtgcatgcgccttgcgccctgctcccaggtgctcactaacccgtaatctggctctgtgtgcagtgctgcccggcagggctgtcgtgtgcgtgttgggtgggaaggcggaggcggcgcggggcgggctggcctctgagcatctggctgcatttagcacg

SEQ ID NO: 256 - DNA, 503 bp, synthetic construct
  misc_feature 1..503: note = Synthetic
  source 1..503: mol_type = other DNA
gagcctcctgcccctcaccaggccctgttagcatcacctcgggcacctggccacagcaggggccagtcagggcaccccgggatagcacgcccaggccctgtgcaaggcctctggcacttaggagaggcttttgcccctttgtcctctgagcagaagggttggcaaagagggaaggggacaggccagttctgcacctggcctttctccagaatgaaggcctccaccacccgtccttccccacagaaagaaaagtaaactgttttcgcggctgcgcagaaagaagaacatggtatgtgcagtgagtgctgcggaggggcgcagaggcccgcgccctggctggccctgtgcatgcgccttgcgccctgctcccaggtgctcactaacccgtaatctggctctgtgtgcatgtgctgcccggcagggctgtcgtgtgcgtgttgggtgggaaggcggaggcggcgcggggcgggctggcctctgagcatctggctgcatttagcacg

SEQ ID NO: 257 - DNA, 504 bp, synthetic construct
  misc_feature 1..504: note = Synthetic
  source 1..504: mol_type = other DNA
gagcctcctgcccctcaccaggccctgttagcatcacctcgggcacctggccacagcaggggccagtcagggcaccccgggatagcacgcccaggccctgtgcaaggcctctggcacttaggagaggcttttgcccctttgtcctctgagcagaagggttggcaaagagggaaggggacaggccagttctgcacctggcctttctccagaatgaaggcctccaccacccgtccttccccacagaaagaaaagtaaactgttttcgcggctgcgcagaaagaagaacatggtatgtgcagtgagtgctgcggaggggcgcagaggcccgcgccctggctggccctgtgcatgcgccttgcgccctgctcccaggtgctcactaacccgtaatctgctgctctgtgtgcagtgctgcccggcagggctgtcgtgtgcgtgttgggtgggaaggcggaggcggcgcggggcgggctggcctctgagcatctggctgcatttagcacg

SEQ ID NO: 258 - DNA, 505 bp, synthetic construct
  misc_feature 1..505: note = Synthetic
  source 1..505: mol_type = other DNA
gagcctcctgcccctcaccaggccctgttagcatcacctcgggcacctggccacagcaggggccagtcagggcaccccgggatagcacgcccaggccctgtgcaaggcctctggcacttaggagaggcttttgcccctttgtcctctgagcagaagggttggcaaagagggaaggggacaggccagttctgcacctggcctttctccagaatgaaggcctccaccacccgtccttccccacagaaagaaaagtaaactgttttcgcggctgcgcagaaagaagaacatggtatgtgcagtgagtgctgcggaggggcgcagaggcccgcgccctggctggccctgtgcatgcgccttgcgccctgctcccaggtgctcactaacccgtaatctgctgctctgtgtgcatgtgctgcccggcagggctgtcgtgtgcgtgttgggtgggaaggcggaggcggcgcggggcgggctggcctctgagcatctggctgcatttagcacg

SEQ ID NO: 259 - DNA, 502 bp, synthetic construct
  misc_feature 1..502: note = Synthetic
  source 1..502: mol_type = other DNA
gagcctcctgcccctcaccaggccctgttagcatcacctcgggcacctggccacagcaggggccagtcagggcaccccgggatagcacgcccaggccctgtgcaaggcctctggcacttaggagaggcttttgcccctttgtcctctgagcagaagggttggcaaagagggaaggggacaggccagttctgcacctggcctttctccagaatgaaggcctccaccacccgtccttccccacagaaagaaaagtaaactgttttcgcggctgcgcagaaagaagaacatggtatgtgcagtgagtgctgcggaggggcgcagaggcccgcgccctggctggccctgtgcatgctgccttgcgccctgctcccaggtgccactaacccgtaatctggctctgtgtgcagtgctgcccggcagggctgtcgtgtgcgtgttgggtgggaaggcggaggcggcgcggggcgggctggcctctgagcatctggctgcatttagcacg

SEQ ID NO: 260 - DNA, 503 bp, synthetic construct
  misc_feature 1..503: note = Synthetic
  source 1..503: mol_type = other DNA
gagcctcctgcccctcaccaggccctgttagcatcacctcgggcacctggccacagcaggggccagtcagggcaccccgggatagcacgcccaggccctgtgcaaggcctctggcacttaggagaggcttttgcccctttgtcctctgagcagaagggttggcaaagagggaaggggacaggccagttctgcacctggcctttctccagaatgaaggcctccaccacccgtccttccccacagaaagaaaagtaaactgttttcgcggctgcgcagaaagaagaacatggtatgtgcagtgagtgctgcggaggggcgcagaggcccgcgccctggctggccctgtgcatgctgccttgcgccctgctcccaggtgccactaacccgtaatctggctctgtgtgcatgtgctgcccggcagggctgtcgtgtgcgtgttgggtgggaaggcggaggcggcgcggggcgggctggcctctgagcatctggctgcatttagcacg

SEQ ID NO: 261 - DNA, 504 bp, synthetic construct
  misc_feature 1..504: note = Synthetic
  source 1..504: mol_type = other DNA
gagcctcctgcccctcaccaggccctgttagcatcacctcgggcacctggccacagcaggggccagtcagggcaccccgggatagcacgcccaggccctgtgcaaggcctctggcacttaggagaggcttttgcccctttgtcctctgagcagaagggttggcaaagagggaaggggacaggccagttctgcacctggcctttctccagaatgaaggcctccaccacccgtccttccccacagaaagaaaagtaaactgttttcgcggctgcgcagaaagaagaacatggtatgtgcagtgagtgctgcggaggggcgcagaggcccgcgccctggctggccctgtgcatgctgccttgcgccctgctcccaggtgccactaacccgtaatctgctgctctgtgtgcagtgctgcccggcagggctgtcgtgtgcgtgttgggtgggaaggcggaggcggcgcggggcgggctggcctctgagcatctggctgcatttagcacg

SEQ ID NO: 262 - DNA, 505 bp, synthetic construct
  misc_feature 1..505: note = Synthetic
  source 1..505: mol_type = other DNA
gagcctcctgcccctcaccaggccctgttagcatcacctcgggcacctggccacagcaggggccagtcagggcaccccgggatagcacgcccaggccctgtgcaaggcctctggcacttaggagaggcttttgcccctttgtcctctgagcagaagggttggcaaagagggaaggggacaggccagttctgcacctggcctttctccagaatgaaggcctccaccacccgtccttccccacagaaagaaaagtaaactgttttcgcggctgcgcagaaagaagaacatggtatgtgcagtgagtgctgcggaggggcgcagaggcccgcgccctggctggccctgtgcatgctgccttgcgccctgctcccaggtgccactaacccgtaatctgctgctctgtgtgcatgtgctgcccggcagggctgtcgtgtgcgtgttgggtgggaaggcggaggcggcgcggggcgggctggcctctgagcatctggctgcatttagcacg

SEQ ID NO: 263 - DNA, 503 bp, synthetic construct
  misc_feature 1..503: note = Synthetic
  source 1..503: mol_type = other DNA
gagcctcctgcccctcaccaggccctgttagcatcacctcgggcacctggccacagcaggggccagtcagggcaccccgggatagcacgcccaggccctgtgcaaggcctctggcacttaggagaggcttttgcccctttgtcctctgagcagaagggttggcaaagagggaaggggacaggccagttctgcacctggcctttctccagaatgaaggcctccaccacccgtccttccccacagaaagaaaagtaaactgttttcgcggctgcgcagaaagaagaacatggtatgtgcagtgagtgctgcggaggggcgcagaggcccgcgccctggctggccctgtgcatgctgccttgcgccctgctcccaggtgctcactaacccgtaatctggctctgtgtgcagtgctgcccggcagggctgtcgtgtgcgtgttgggtgggaaggcggaggcggcgcggggcgggctggcctctgagcatctggctgcatttagcacg

SEQ ID NO: 264 - DNA, 504 bp, synthetic construct
  misc_feature 1..504: note = Synthetic
  source 1..504: mol_type = other DNA
gagcctcctgcccctcaccaggccctgttagcatcacctcgggcacctggccacagcaggggccagtcagggcaccccgggatagcacgcccaggccctgtgcaaggcctctggcacttaggagaggcttttgcccctttgtcctctgagcagaagggttggcaaagagggaaggggacaggccagttctgcacctggcctttctccagaatgaaggcctccaccacccgtccttccccacagaaagaaaagtaaactgttttcgcggctgcgcagaaagaagaacatggtatgtgcagtgagtgctgcggaggggcgcagaggcccgcgccctggctggccctgtgcatgctgccttgcgccctgctcccaggtgctcactaacccgtaatctggctctgtgtgcatgtgctgcccggcagggctgtcgtgtgcgtgttgggtgggaaggcggaggcggcgcggggcgggctggcctctgagcatctggctgcatttagcacg

SEQ ID NO: 265 - DNA, 505 bp, synthetic construct
  misc_feature 1..505: note = Synthetic
  source 1..505: mol_type = other DNA
gagcctcctgcccctcaccaggccctgttagcatcacctcgggcacctggccacagcaggggccagtcagggcaccccgggatagcacgcccaggccctgtgcaaggcctctggcacttaggagaggcttttgcccctttgtcctctgagcagaagggttggcaaagagggaaggggacaggccagttctgcacctggcctttctccagaatgaaggcctccaccacccgtccttccccacagaaagaaaagtaaactgttttcgcggctgcgcagaaagaagaacatggtatgtgcagtgagtgctgcggaggggcgcagaggcccgcgccctggctggccctgtgcatgctgccttgcgccctgctcccaggtgctcactaacccgtaatctgctgctctgtgtgcagtgctgcccggcagggctgtcgtgtgcgtgttgggtgggaaggcggaggcggcgcggggcgggctggcctctgagcatctggctgcatttagcacg

SEQ ID NO: 266 - DNA, 506 bp, synthetic construct
  misc_feature 1..506: note = Synthetic
  source 1..506: mol_type = other DNA
gagcctcctgcccctcaccaggccctgttagcatcacctcgggcacctggccacagcaggggccagtcagggcaccccgggatagcacgcccaggccctgtgcaaggcctctggcacttaggagaggcttttgcccctttgtcctctgagcagaagggttggcaaagagggaaggggacaggccagttctgcacctggcctttctccagaatgaaggcctccaccacccgtccttccccacagaaagaaaagtaaactgttttcgcggctgcgcagaaagaagaacatggtatgtgcagtgagtgctgcggaggggcgcagaggcccgcgccctggctggccctgtgcatgctgccttgcgccctgctcccaggtgctcactaacccgtaatctgctgctctgtgtgcatgtgctgcccggcagggctgtcgtgtgcgtgttgggtgggaaggcggaggcggcgcggggcgggctggcctctgagcatctggctgcatttagcacg

SEQ ID NO: 267 - DNA, 501 bp, synthetic construct
  misc_feature 1..501: note = Synthetic
  source 1..501: mol_type = other DNA
gagcctcctgcccctcaccaggccctgttagcatcacctcgggcacctggccacagcaggggccagtcagggcaccccgggatagcacgcccaggccctgtgcaaggcctctggcacttaggagaggcttttgcccctttgtcctctgagcagaagggttggcaaagagggaaggggacaggccagttctgcacctggcctttctccagaatgaaggcctccaccacccgtccttccccacagaaagaaaagtaaactgttttcgcggctgcgcagaaagaagaacatggtacgagcagtgagtgctgcggaggggcgcagaggcccgcgccctggctggccctgtgcatgcgccttgcgccctgctcccaggtgccactaacccgtaatctggctctgtgtgcagtgctgcccggcagggctgtcgtgtgcgtgttgggtgggaaggcggaggcggcgcggggcgggctggcctctgagcatctggctgcatttagcacg

SEQ ID NO: 268 - DNA, 502 bp, synthetic construct
  misc_feature 1..502: note = Synthetic
  source 1..502: mol_type = other DNA
gagcctcctgcccctcaccaggccctgttagcatcacctcgggcacctggccacagcaggggccagtcagggcaccccgggatagcacgcccaggccctgtgcaaggcctctggcacttaggagaggcttttgcccctttgtcctctgagcagaagggttggcaaagagggaaggggacaggccagttctgcacctggcctttctccagaatgaaggcctccaccacccgtccttccccacagaaagaaaagtaaactgttttcgcggctgcgcagaaagaagaacatggtacgagcagtgagtgctgcggaggggcgcagaggcccgcgccctggctggccctgtgcatgcgccttgcgccctgctcccaggtgccactaacccgtaatctggctctgtgtgcatgtgctgcccggcagggctgtcgtgtgcgtgttgggtgggaaggcggaggcggcgcggggcgggctggcctctgagcatctggctgcatttagcacg

SEQ ID NO: 269 - DNA, 503 bp, synthetic construct
  misc_feature 1..503: note = Synthetic
  source 1..503: mol_type = other DNA
gagcctcctgcccctcaccaggccctgttagcatcacctcgggcacctggccacagcaggggccagtcagggcaccccgggatagcacgcccaggccctgtgcaaggcctctggcacttaggagaggcttttgcccctttgtcctctgagcagaagggttggcaaagagggaaggggacaggccagttctgcacctggcctttctccagaatgaaggcctccaccacccgtccttccccacagaaagaaaagtaaactgttttcgcggctgcgcagaaagaagaacatggtacgagcagtgagtgctgcggaggggcgcagaggcccgcgccctggctggccctgtgcatgcgccttgcgccctgctcccaggtgccactaacccgtaatctgctgctctgtgtgcagtgctgcccggcagggctgtcgtgtgcgtgttgggtgggaaggcggaggcggcgcggggcgggctggcctctgagcatctggctgcatttagcacg

SEQ ID NO: 270 - DNA, 504 bp, synthetic construct
  misc_feature 1..504: note = Synthetic
  source 1..504: mol_type = other DNA
gagcctcctgcccctcaccaggccctgttagcatcacctcgggcacctggccacagcaggggccagtcagggcaccccgggatagcacgcccaggccctgtgcaaggcctctggcacttaggagaggcttttgcccctttgtcctctgagcagaagggttggcaaagagggaaggggacaggccagttctgcacctggcctttctccagaatgaaggcctccaccacccgtccttccccacagaaagaaaagtaaactgttttcgcggctgcgcagaaagaagaacatggtacgagcagtgagtgctgcggaggggcgcagaggcccgcgccctggctggccctgtgcatgcgccttgcgccctgctcccaggtgccactaacccgtaatctgctgctctgtgtgcatgtgctgcccggcagggctgtcgtgtgcgtgttgggtgggaaggcggaggcggcgcggggcgggctggcctctgagcatctggctgcatttagcacg

SEQ ID NO: 271 - DNA, 502 bp, synthetic construct
  misc_feature 1..502: note = Synthetic
  source 1..502: mol_type = other DNA
gagcctcctgcccctcaccaggccctgttagcatcacctcgggcacctggccacagcaggggccagtcagggcaccccgggatagcacgcccaggccctgtgcaaggcctctggcacttaggagaggcttttgcccctttgtcctctgagcagaagggttggcaaagagggaaggggacaggccagttctgcacctggcctttctccagaatgaaggcctccaccacccgtccttccccacagaaagaaaagtaaactgttttcgcggctgcgcagaaagaagaacatggtacgagcagtgagtgctgcggaggggcgcagaggcccgcgccctggctggccctgtgcatgcgccttgcgccctgctcccaggtgctcactaacccgtaatctggctctgtgtgcagtgctgcccggcagggctgtcgtgtgcgtgttgggtgggaaggcggaggcggcgcggggcgggctggcctctgagcatctggctgcatttagcacg

SEQ ID NO: 272 - DNA, 503 bp, synthetic construct
  misc_feature 1..503: note = Synthetic
  source 1..503: mol_type = other DNA
gagcctcctgcccctcaccaggccctgttagcatcacctcgggcacctggccacagcaggggccagtcagggcaccccgggatagcacgcccaggccctgtgcaaggcctctggcacttaggagaggcttttgcccctttgtcctctgagcagaagggttggcaaagagggaaggggacaggccagttctgcacctggcctttctccagaatgaaggcctccaccacccgtccttccccacagaaagaaaagtaaactgttttcgcggctgcgcagaaagaagaacatggtacgagcagtgagtgctgcggaggggcgcagaggcccgcgccctggctggccctgtgcatgcgccttgcgccctgctcccaggtgctcactaacccgtaatctggctctgtgtgcatgtgctgcccggcagggctgtcgtgtgcgtgttgggtgggaaggcggaggcggcgcggggcgggctggcctctgagcatctggctgcatttagcacg

SEQ ID NO: 273 - DNA, 504 bp, synthetic construct
  misc_feature 1..504: note = Synthetic
  source 1..504: mol_type = other DNA
gagcctcctgcccctcaccaggccctgttagcatcacctcgggcacctggccacagcaggggccagtcagggcaccccgggatagcacgcccaggccctgtgcaaggcctctggcacttaggagaggcttttgcccctttgtcctctgagcagaagggttggcaaagagggaaggggacaggccagttctgcacctggcctttctccagaatgaaggcctccaccacccgtccttccccacagaaagaaaagtaaactgttttcgcggctgcgcagaaagaagaacatggtacgagcagtgagtgctgcggaggggcgcagaggcccgcgccctggctggccctgtgcatgcgccttgcgccctgctcccaggtgctcactaacccgtaatctgctgctctgtgtgcagtgctgcccggcagggctgtcgtgtgcgtgttgggtgggaaggcggaggcggcgcggggcgggctggcctctgagcatctggctgcatttagcacg

SEQ ID NO: 274 - DNA, 505 bp, synthetic construct
  misc_feature 1..505: note = Synthetic
  source 1..505: mol_type = other DNA
gagcctcctgcccctcaccaggccctgttagcatcacctcgggcacctggccacagcaggggccagtcagggcaccccgggatagcacgcccaggccctgtgcaaggcctctggcacttaggagaggcttttgcccctttgtcctctgagcagaagggttggcaaagagggaaggggacaggccagttctgcacctggcctttctccagaatgaaggcctccaccacccgtccttccccacagaaagaaaagtaaactgttttcgcggctgcgcagaaagaagaacatggtacgagcagtgagtgctgcggaggggcgcagaggcccgcgccctggctggccctgtgcatgcgccttgcgccctgctcccaggtgctcactaacccgtaatctgctgctctgtgtgcatgtgctgcccggcagggctgtcgtgtgcgtgttgggtgggaaggcggaggcggcgcggggcgggctggcctctgagcatctggctgcatttagcacg

SEQ ID NO: 275 - DNA, 502 bp, synthetic construct
  misc_feature 1..502: note = Synthetic
  source 1..502: mol_type = other DNA
gagcctcctgcccctcaccaggccctgttagcatcacctcgggcacctggccacagcaggggccagtcagggcaccccgggatagcacgcccaggccctgtgcaaggcctctggcacttaggagaggcttttgcccctttgtcctctgagcagaagggttggcaaagagggaaggggacaggccagttctgcacctggcctttctccagaatgaaggcctccaccacccgtccttccccacagaaagaaaagtaaactgttttcgcggctgcgcagaaagaagaacatggtacgagcagtgagtgctgcggaggggcgcagaggcccgcgccctggctggccctgtgcatgctgccttgcgccctgctcccaggtgccactaacccgtaatctggctctgtgtgcagtgctgcccggcagggctgtcgtgtgcgtgttgggtgggaaggcggaggcggcgcggggcgggctggcctctgagcatctggctgcatttagcacg

SEQ ID NO: 276 - DNA, 503 bp, synthetic construct
  misc_feature 1..503: note = Synthetic
  source 1..503: mol_type = other DNA
gagcctcctgcccctcaccaggccctgttagcatcacctcgggcacctggccacagcaggggccagtcagggcaccccgggatagcacgcccaggccctgtgcaaggcctctggcacttaggagaggcttttgcccctttgtcctctgagcagaagggttggcaaagagggaaggggacaggccagttctgcacctggcctttctccagaatgaaggcctccaccacccgtccttccccacagaaagaaaagtaaactgttttcgcggctgcgcagaaagaagaacatggtacgagcagtgagtgctgcggaggggcgcagaggcccgcgccctggctggccctgtgcatgctgccttgcgccctgctcccaggtgccactaacccgtaatctggctctgtgtgcatgtgctgcccggcagggctgtcgtgtgcgtgttgggtgggaaggcggaggcggcgcggggcgggctggcctctgagcatctggctgcatttagcacg

SEQ ID NO: 277 - DNA, 504 bp, synthetic construct
  misc_feature 1..504: note = Synthetic
  source 1..504: mol_type = other DNA
gagcctcctgcccctcaccaggccctgttagcatcacctcgggcacctggccacagcaggggccagtcagggcaccccgggatagcacgcccaggccctgtgcaaggcctctggcacttaggagaggcttttgcccctttgtcctctgagcagaagggttggcaaagagggaaggggacaggccagttctgcacctggcctttctccagaatgaaggcctccaccacccgtccttccccacagaaagaaaagtaaactgttttcgcggctgcgcagaaagaagaacatggtacgagcagtgagtgctgcggaggggcgcagaggcccgcgccctggctggccctgtgcatgctgccttgcgccctgctcccaggtgccactaacccgtaatctgctgctctgtgtgcagtgctgcccggcagggctgtcgtgtgcgtgttgggtgggaaggcggaggcggcgcggggcgggctggcctctgagcatctggctgcatttagcacg

SEQ ID NO: 278 - DNA, 505 bp, synthetic construct
  misc_feature 1..505: note = Synthetic
  source 1..505: mol_type = other DNA
gagcctcctgcccctcaccaggccctgttagcatcacctcgggcacctggccacagcaggggccagtcagggcaccccgggatagcacgcccaggccctgtgcaaggcctctggcacttaggagaggcttttgcccctttgtcctctgagcagaagggttggcaaagagggaaggggacaggccagttctgcacctggcctttctccagaatgaaggcctccaccacccgtccttccccacagaaagaaaagtaaactgttttcgcggctgcgcagaaagaagaacatggtacgagcagtgagtgctgcggaggggcgcagaggcccgcgccctggctggccctgtgcatgctgccttgcgccctgctcccaggtgccactaacccgtaatctgctgctctgtgtgcatgtgctgcccggcagggctgtcgtgtgcgtgttgggtgggaaggcggaggcggcgcggggcgggctggcctctgagcatctggctgcatttagcacg

SEQ ID NO: 279 - DNA, 503 bp, synthetic construct
  misc_feature 1..503: note = Synthetic
  source 1..503: mol_type = other DNA
gagcctcctgcccctcaccaggccctgttagcatcacctcgggcacctggccacagcaggggccagtcagggcaccccgggatagcacgcccaggccctgtgcaaggcctctggcacttaggagaggcttttgcccctttgtcctctgagcagaagggttggcaaagagggaaggggacaggccagttctgcacctggcctttctccagaatgaaggcctccaccacccgtccttccccacagaaagaaaagtaaactgttttcgcggctgcgcagaaagaagaacatggtacgagcagtgagtgctgcggaggggcgcagaggcccgcgccctggctggccctgtgcatgctgccttgcgccctgctcccaggtgctcactaacccgtaatctggctctgtgtgcagtgctgcccggcagggctgtcgtgtgcgtgttgggtgggaaggcggaggcggcgcggggcgggctggcctctgagcatctggctgcatttagcacg

SEQ ID NO: 280 - DNA, 504 bp, synthetic construct
  misc_feature 1..504: note = Synthetic
  source 1..504: mol_type = other DNA
gagcctcctgcccctcaccaggccctgttagcatcacctcgggcacctggccacagcaggggccagtcagggcaccccgggatagcacgcccaggccctgtgcaaggcctctggcacttaggagaggcttttgcccctttgtcctctgagcagaagggttggcaaagagggaaggggacaggccagttctgcacctggcctttctccagaatgaaggcctccaccacccgtccttccccacagaaagaaaagtaaactgttttcgcggctgcgcagaaagaagaacatggtacgagcagtgagtgctgcggaggggcgcagaggcccgcgccctggctggccctgtgcatgctgccttgcgccctgctcccaggtgctcactaacccgtaatctggctctgtgtgcatgtgctgcccggcagggctgtcgtgtgcgtgttgggtgggaaggcggaggcggcgcggggcgggctggcctctgagcatctggctgcatttagcacg

SEQ ID NO: 281 - DNA, 505 bp, synthetic construct
  misc_feature 1..505: note = Synthetic
  source 1..505: mol_type = other DNA
gagcctcctgcccctcaccaggccctgttagcatcacctcgggcacctggccacagcaggggccagtcagggcaccccgggatagcacgcccaggccctgtgcaaggcctctggcacttaggagaggcttttgcccctttgtcctctgagcagaagggttggcaaagagggaaggggacaggccagttctgcacctggcctttctccagaatgaaggcctccaccacccgtccttccccacagaaagaaaagtaaactgttttcgcggctgcgcagaaagaagaacatggtacgagcagtgagtgctgcggaggggcgcagaggcccgcgccctggctggccctgtgcatgctgccttgcgccctgctcccaggtgctcactaacccgtaatctgctgctctgtgtgcagtgctgcccggcagggctgtcgtgtgcgtgttgggtgggaaggcggaggcggcgcggggcgggctggcctctgagcatctggctgcatttagcacg

SEQ ID NO: 282 - DNA, 506 bp, synthetic construct
  misc_feature 1..506: note = Synthetic
  source 1..506: mol_type = other DNA
gagcctcctgcccctcaccaggccctgttagcatcacctcgggcacctggccacagcaggggccagtcagggcaccccgggatagcacgcccaggccctgtgcaaggcctctggcacttaggagaggcttttgcccctttgtcctctgagcagaagggttggcaaagagggaaggggacaggccagttctgcacctggcctttctccagaatgaaggcctccaccacccgtccttccccacagaaagaaaagtaaactgttttcgcggctgcgcagaaagaagaacatggtacgagcagtgagtgctgcggaggggcgcagaggcccgcgccctggctggccctgtgcatgctgccttgcgccctgctcccaggtgctcactaacccgtaatctgctgctctgtgtgcatgtgctgcccggcagggctgtcgtgtgcgtgttgggtgggaaggcggaggcggcgcggggcgggctggcctctgagcatctggctgcatttagcacg

SEQ ID NO: 283 - DNA, 501 bp, synthetic construct
  misc_feature 1..501: note = Synthetic
  source 1..501: mol_type = other DNA
gagcctcctgcccctcaccaggccctgttagcatcacctcgggcacctggccacagcaggggccagtcagggcaccccgggatagcacgcccaggccctgtgcaaggcctctggcacttaggagaggcttttgcccctttgtcctctgagcagaagggttggcaaagagggaaggggacaggccagttctgcacctggcctttctccagaatgaaggcctccaccacccgtccttccccacagaaagaaaagtaaactgttttcgcggctgcgcagaaagaagaacatggttcgtgcagtgagtgctgcggaggggcgcagaggcccgcgccctggctggccctgtgcatgcgccttgcgccctgctcccaggtgccactaacccgtaatctggctctgtgtgcagtgctgcccggcagggctgtcgtgtgcgtgttgggtgggaaggcggaggcggcgcggggcgggctggcctctgagcatctggctgcatttagcacg

SEQ ID NO: 284 - DNA, 502 bp, synthetic construct
  misc_feature 1..502: note = Synthetic
  source 1..502: mol_type = other DNA
gagcctcctgcccctcaccaggccctgttagcatcacctcgggcacctggccacagcaggggccagtcagggcaccccgggatagcacgcccaggccctgtgcaaggcctctggcacttaggagaggcttttgcccctttgtcctctgagcagaagggttggcaaagagggaaggggacaggccagttctgcacctggcctttctccagaatgaaggcctccaccacccgtccttccccacagaaagaaaagtaaactgttttcgcggctgcgcagaaagaagaacatggttcgtgcagtgagtgctgcggaggggcgcagaggcccgcgccctggctggccctgtgcatgcgccttgcgccctgctcccaggtgccactaacccgtaatctggctctgtgtgcatgtgctgcccggcagggctgtcgtgtgcgtgttgggtgggaaggcggaggcggcgcggggcgggctggcctctgagcatctggctgcatttagcacg

SEQ ID NO: 285 - DNA, 503 bp, synthetic construct
  misc_feature 1..503: note = Synthetic
  source 1..503: mol_type = other DNA
gagcctcctgcccctcaccaggccctgttagcatcacctcgggcacctggccacagcaggggccagtcagggcaccccgggatagcacgcccaggccctgtgcaaggcctctggcacttaggagaggcttttgcccctttgtcctctgagcagaagggttggcaaagagggaaggggacaggccagttctgcacctggcctttctccagaatgaaggcctccaccacccgtccttccccacagaaagaaaagtaaactgttttcgcggctgcgcagaaagaagaacatggttcgtgcagtgagtgctgcggaggggcgcagaggcccgcgccctggctggccctgtgcatgcgccttgcgccctgctcccaggtgccactaacccgtaatctgctgctctgtgtgcagtgctgcccggcagggctgtcgtgtgcgtgttgggtgggaaggcggaggcggcgcggggcgggctggcctctgagcatctggctgcatttagcacg

SEQ ID NO: 286 - DNA, 504 bp, synthetic construct
  misc_feature 1..504: note = Synthetic
  source 1..504: mol_type = other DNA
gagcctcctgcccctcaccaggccctgttagcatcacctcgggcacctggccacagcaggggccagtcagggcaccccgggatagcacgcccaggccctgtgcaaggcctctggcacttaggagaggcttttgcccctttgtcctctgagcagaagggttggcaaagagggaaggggacaggccagttctgcacctggcctttctccagaatgaaggcctccaccacccgtccttccccacagaaagaaaagtaaactgttttcgcggctgcgcagaaagaagaacatggttcgtgcagtgagtgctgcggaggggcgcagaggcccgcgccctggctggccctgtgcatgcgccttgcgccctgctcccaggtgccactaacccgtaatctgctgctctgtgtgcatgtgctgcccggcagggctgtcgtgtgcgtgttgggtgggaaggcggaggcggcgcggggcgggctggcctctgagcatctggctgcatttagcacg

SEQ ID NO: 287 - DNA, 502 bp, synthetic construct
  misc_feature 1..502: note = Synthetic
  source 1..502: mol_type = other DNA
gagcctcctgcccctcaccaggccctgttagcatcacctcgggcacctggccacagcaggggccagtcagggcaccccgggatagcacgcccaggccctgtgcaaggcctctggcacttaggagaggcttttgcccctttgtcctctgagcagaagggttggcaaagagggaaggggacaggccagttctgcacctggcctttctccagaatgaaggcctccaccacccgtccttccccacagaaagaaaagtaaactgttttcgcggctgcgcagaaagaagaacatggttcgtgcagtgagtgctgcggaggggcgcagaggcccgcgccctggctggccctgtgcatgcgccttgcgccctgctcccaggtgctcactaacccgtaatctggctctgtgtgcagtgctgcccggcagggctgtcgtgtgcgtgttgggtgggaaggcggaggcggcgcggggcgggctggcctctgagcatctggctgcatttagcacg

SEQ ID NO: 288 - DNA, 503 bp, synthetic construct
  misc_feature 1..503: note = Synthetic
  source 1..503: mol_type = other DNA
gagcctcctgcccctcaccaggccctgttagcatcacctcgggcacctggccacagcaggggccagtcagggcaccccgggatagcacgcccaggccctgtgcaaggcctctggcacttaggagaggcttttgcccctttgtcctctgagcagaagggttggcaaagagggaaggggacaggccagttctgcacctggcctttctccagaatgaaggcctccaccacccgtccttccccacagaaagaaaagtaaactgttttcgcggctgcgcagaaagaagaacatggttcgtgcagtgagtgctgcggaggggcgcagaggcccgcgccctggctggccctgtgcatgcgccttgcgccctgctcccaggtgctcactaacccgtaatctggctctgtgtgcatgtgctgcccggcagggctgtcgtgtgcgtgttgggtgggaaggcggaggcggcgcggggcgggctggcctctgagcatctggctgcatttagcacg

SEQ ID NO: 289 - DNA, 504 bp, synthetic construct
  misc_feature 1..504: note = Synthetic
  source 1..504: mol_type = other DNA
gagcctcctgcccctcaccaggccctgttagcatcacctcgggcacctggccacagcaggggccagtcagggcaccccgggatagcacgcccaggccctgtgcaaggcctctggcacttaggagaggcttttgcccctttgtcctctgagcagaagggttggcaaagagggaaggggacaggccagttctgcacctggcctttctccagaatgaaggcctccaccacccgtccttccccacagaaagaaaagtaaactgttttcgcggctgcgcagaaagaagaacatggttcgtgcagtgagtgctgcggaggggcgcagaggcccgcgccctggctggccctgtgcatgcgccttgcgccctgctcccaggtgctcactaacccgtaatctgctgctctgtgtgcagtgctgcccggcagggctgtcgtgtgcgtgttgggtgggaaggcggaggcggcgcggggcgggctggcctctgagcatctggctgcatttagcacg

SEQ ID NO: 290 - DNA, 505 bp, synthetic construct
  misc_feature 1..505: note = Synthetic
  source 1..505: mol_type = other DNA
gagcctcctgcccctcaccaggccctgttagcatcacctcgggcacctggccacagcaggggccagtcagggcaccccgggatagcacgcccaggccctgtgcaaggcctctggcacttaggagaggcttttgcccctttgtcctctgagcagaagggttggcaaagagggaaggggacaggccagttctgcacctggcctttctccagaatgaaggcctccaccacccgtccttccccacagaaagaaaagtaaactgttttcgcggctgcgcagaaagaagaacatggttcgtgcagtgagtgctgcggaggggcgcagaggcccgcgccctggctggccctgtgcatgcgccttgcgccctgctcccaggtgctcactaacccgtaatctgctgctctgtgtgcatgtgctgcccggcagggctgtcgtgtgcgtgttgggtgggaaggcggaggcggcgcggggcgggctggcctctgagcatctggctgcatttagcacg

SEQ ID NO: 291 - DNA, 502 bp, synthetic construct
  misc_feature 1..502: note = Synthetic
  source 1..502: mol_type = other DNA
gagcctcctgcccctcaccaggccctgttagcatcacctcgggcacctggccacagcaggggccagtcagggcaccccgggatagcacgcccaggccctgtgcaaggcctctggcacttaggagaggcttttgcccctttgtcctctgagcagaagggttggcaaagagggaaggggacaggccagttctgcacctggcctttctccagaatgaaggcctccaccacccgtccttccccacagaaagaaaagtaaactgttttcgcggctgcgcagaaagaagaacatggttcgtgcagtgagtgctgcggaggggcgcagaggcccgcgccctggctggccctgtgcatgctgccttgcgccctgctcccaggtgccactaacccgtaatctggctctgtgtgcagtgctgcccggcagggctgtcgtgtgcgtgttgggtgggaaggcggaggcggcgcggggcgggctggcctctgagcatctggctgcatttagcacg

SEQ ID NO: 292 - DNA, 503 bp, synthetic construct
  misc_feature 1..503: note = Synthetic
  source 1..503: mol_type = other DNA
gagcctcctgcccctcaccaggccctgttagcatcacctcgggcacctggccacagcaggggccagtcagggcaccccgggatagcacgcccaggccctgtgcaaggcctctggcacttaggagaggcttttgcccctttgtcctctgagcagaagggttggcaaagagggaaggggacaggccagttctgcacctggcctttctccagaatgaaggcctccaccacccgtccttccccacagaaagaaaagtaaactgttttcgcggctgcgcagaaagaagaacatggttcgtgcagtgagtgctgcggaggggcgcagaggcccgcgccctggctggccctgtgcatgctgccttgcgccctgctcccaggtgccactaacccgtaatctggctctgtgtgcatgtgctgcccggcagggctgtcgtgtgcgtgttgggtgggaaggcggaggcggcgcggggcgggctggcctctgagcatctggctgcatttagcacg

SEQ ID NO: 293 - DNA, 504 bp, synthetic construct
  misc_feature 1..504: note = Synthetic
  source 1..504: mol_type = other DNA
gagcctcctgcccctcaccaggccctgttagcatcacctcgggcacctggccacagcaggggccagtcagggcaccccgggatagcacgcccaggccctgtgcaaggcctctggcacttaggagaggcttttgcccctttgtcctctgagcagaagggttggcaaagagggaaggggacaggccagttctgcacctggcctttctccagaatgaaggcctccaccacccgtccttccccacagaaagaaaagtaaactgttttcgcggctgcgcagaaagaagaacatggttcgtgcagtgagtgctgcggaggggcgcagaggcccgcgccctggctggccctgtgcatgctgccttgcgccctgctcccaggtgccactaacccgtaatctgctgctctgtgtgcagtgctgcccggcagggctgtcgtgtgcgtgttgggtgggaaggcggaggcggcgcggggcgggctggcctctgagcatctggctgcatttagcacg

SEQ ID NO: 294 - DNA, 505 bp, synthetic construct
  misc_feature 1..505: note = Synthetic
  source 1..505: mol_type = other DNA
gagcctcctgcccctcaccaggccctgttagcatcacctcgggcacctggccacagcaggggccagtcagggcaccccgggatagcacgcccaggccctgtgcaaggcctctggcacttaggagaggcttttgcccctttgtcctctgagcagaagggttggcaaagagggaaggggacaggccagttctgcacctggcctttctccagaatgaaggcctccaccacccgtccttccccacagaaagaaaagtaaactgttttcgcggctgcgcagaaagaagaacatggttcgtgcagtgagtgctgcggaggggcgcagaggcccgcgccctggctggccctgtgcatgctgccttgcgccctgctcccaggtgccactaacccgtaatctgctgctctgtgtgcatgtgctgcccggcagggctgtcgtgtgcgtgttgggtgggaaggcggaggcggcgcggggcgggctggcctctgagcatctggctgcatttagcacg

SEQ ID NO: 295 - DNA, 503 bp, synthetic construct
  misc_feature 1..503: note = Synthetic
  source 1..503: mol_type = other DNA
gagcctcctgcccctcaccaggccctgttagcatcacctcgggcacctggccacagcaggggccagtcagggcaccccgggatagcacgcccaggccctgtgcaaggcctctggcacttaggagaggcttttgcccctttgtcctctgagcagaagggttggcaaagagggaaggggacaggccagttctgcacctggcctttctccagaatgaaggcctccaccacccgtccttccccacagaaagaaaagtaaactgttttcgcggctgcgcagaaagaagaacatggttcgtgcagtgagtgctgcggaggggcgcagaggcccgcgccctggctggccctgtgcatgctgccttgcgccctgctcccaggtgctcactaacccgtaatctggctctgtgtgcagtgctgcccggcagggctgtcgtgtgcgtgttgggtgggaaggcggaggcggcgcggggcgggctggcctctgagcatctggctgcatttagcacg

SEQ ID NO: 296 - DNA, 504 bp, synthetic construct
  misc_feature 1..504: note = Synthetic
  source 1..504: mol_type = other DNA
gagcctcctgcccctcaccaggccctgttagcatcacctcgggcacctggccacagcaggggccagtcagggcaccccgggatagcacgcccaggccctgtgcaaggcctctggcacttaggagaggcttttgcccctttgtcctctgagcagaagggttggcaaagagggaaggggacaggccagttctgcacctggcctttctccagaatgaaggcctccaccacccgtccttccccacagaaagaaaagtaaactgttttcgcggctgcgcagaaagaagaacatggttcgtgcagtgagtgctgcggaggggcgcagaggcccgcgccctggctggccctgtgcatgctgccttgcgccctgctcccaggtgctcactaacccgtaatctggctctgtgtgcatgtgctgcccggcagggctgtcgtgtgcgtgttgggtgggaaggcggaggcggcgcggggcgggctggcctctgagcatctggctgcatttagcacg

SEQ ID NO: 297 - DNA, 505 bp, synthetic construct
  misc_feature 1..505: note = Synthetic
  source 1..505: mol_type = other DNA
gagcctcctgcccctcaccaggccctgttagcatcacctcgggcacctggccacagcaggggccagtcagggcaccccgggatagcacgcccaggccctgtgcaaggcctctggcacttaggagaggcttttgcccctttgtcctctgagcagaagggttggcaaagagggaaggggacaggccagttctgcacctggcctttctccagaatgaaggcctccaccacccgtccttccccacagaaagaaaagtaaactgttttcgcggctgcgcagaaagaagaacatggttcgtgcagtgagtgctgcggaggggcgcagaggcccgcgccctggctggccctgtgcatgctgccttgcgccctgctcccaggtgctcactaacccgtaatctgctgctctgtgtgcagtgctgcccggcagggctgtcgtgtgcgtgttgggtgggaaggcggaggcggcgcggggcgggctggcctctgagcatctggctgcatttagcacg

SEQ ID NO: 298 - DNA, 506 bp, synthetic construct
  misc_feature 1..506: note = Synthetic
  source 1..506: mol_type = other DNA
gagcctcctgcccctcaccaggccctgttagcatcacctcgggcacctggccacagcaggggccagtcagggcaccccgggatagcacgcccaggccctgtgcaaggcctctggcacttaggagaggcttttgcccctttgtcctctgagcagaagggttggcaaagagggaaggggacaggccagttctgcacctggcctttctccagaatgaaggcctccaccacccgtccttccccacagaaagaaaagtaaactgttttcgcggctgcgcagaaagaagaacatggttcgtgcagtgagtgctgcggaggggcgcagaggcccgcgccctggctggccctgtgcatgctgccttgcgccctgctcccaggtgctcactaacccgtaatctgctgctctgtgtgcatgtgctgcccggcagggctgtcgtgtgcgtgttgggtgggaaggcggaggcggcgcggggcgggctggcctctgagcatctggctgcatttagcacg

SEQ ID NO: 299 - DNA, 501 bp, synthetic construct
  misc_feature 1..501: note = Synthetic
  source 1..501: mol_type = other DNA
gagcctcctgcccctcaccaggccctgttagcatcacctcgggcacctggccacagcaggggccagtcagggcaccccgggatagcacgcccaggccctgtgcaaggcctctggcacttaggagaggcttttgcccctttgtcctctgagcagaagggttggcaaagagggaaggggacaggccagttctgcacctggcctttctccagaatgaaggcctccacccaccgtccgtccccacagaaagaaaagtaaactgttttcgcggctgcgcagaaagaagaacatggtacgtgcagtgagtgctgcggaggggcgcagaggcccgcgccctggctggccctgtgcatgcgccttgcgccctgctcccaggtgccactaacccgtaatctggctctgtgtgcagtgctgcccggcagggctgtcgtgtgcgtgttgggtgggaaggcggaggcggcgcggggcgggctggcctctgagcatctggctgcatttagcacg

SEQ ID NO: 300 - DNA, 502 bp, synthetic construct
  misc_feature 1..502: note = Synthetic
  source 1..502: mol_type = other DNA
gagcctcctgcccctcaccaggccctgttagcatcacctcgggcacctggccacagcaggggccagtcagggcaccccgggatagcacgcccaggccctgtgcaaggcctctggcacttaggagaggcttttgcccctttgtcctctgagcagaagggttggcaaagagggaaggggacaggccagttctgcacctggcctttctccagaatgaaggcctccacccaccgtccgtccccacagaaagaaaagtaaactgttttcgcggctgcgcagaaagaagaacatggtacgtgcagtgagtgctgcggaggggcgcagaggcccgcgccctggctggccctgtgcatgcgccttgcgccctgctcccaggtgccactaacccgtaatctggctctgtgtgcatgtgctgcccggcagggctgtcgtgtgcgtgttgggtgggaaggcggaggcggcgcggggcgggctggcctctgagcatctggctgcatttagcacg

SEQ ID NO: 301 - DNA, 503 bp, synthetic construct
  misc_feature 1..503: note = Synthetic
  source 1..503: mol_type = other DNA
gagcctcctgcccctcaccaggccctgttagcatcacctcgggcacctggccacagcaggggccagtcagggcaccccgggatagcacgcccaggccctgtgcaaggcctctggcacttaggagaggcttttgcccctttgtcctctgagcagaagggttggcaaagagggaaggggacaggccagttctgcacctggcctttctccagaatgaaggcctccacccaccgtccgtccccacagaaagaaaagtaaactgttttcgcggctgcgcagaaagaagaacatggtacgtgcagtgagtgctgcggaggggcgcagaggcccgcgccctggctggccctgtgcatgcgccttgcgccctgctcccaggtgccactaacccgtaatctgctgctctgtgtgcagtgctgcccggcagggctgtcgtgtgcgtgttgggtgggaaggcggaggcggcgcggggcgggctggcctctgagcatctggctgcatttagcacg

SEQ ID NO: 302 - DNA, 504 bp, synthetic construct
  misc_feature 1..504: note = Synthetic
  source 1..504: mol_type = other DNA
gagcctcctgcccctcaccaggccctgttagcatcacctcgggcacctggccacagcaggggccagtcagggcaccccgggatagcacgcccaggccctgtgcaaggcctctggcacttaggagaggcttttgcccctttgtcctctgagcagaagggttggcaaagagggaaggggacaggccagttctgcacctggcctttctccagaatgaaggcctccacccaccgtccgtccccacagaaagaaaagtaaactgttttcgcggctgcgcagaaagaagaacatggtacgtgcagtgagtgctgcggaggggcgcagaggcccgcgccctggctggccctgtgcatgcgccttgcgccctgctcccaggtgccactaacccgtaatctgctgctctgtgtgcatgtgctgcccggcagggctgtcgtgtgcgtgttgggtgggaaggcggaggcggcgcggggcgggctggcctctgagcatctggctgcatttagcacg

SEQ ID NO: 303 - DNA, 502 bp, synthetic construct
  misc_feature 1..502: note = Synthetic
  source 1..502: mol_type = other DNA
gagcctcctgcccctcaccaggccctgttagcatcacctcgggcacctggccacagcaggggccagtcagggcaccccgggatagcacgcccaggccctgtgcaaggcctctggcacttaggagaggcttttgcccctttgtcctctgagcagaagggttggcaaagagggaaggggacaggccagttctgcacctggcctttctccagaatgaaggcctccacccaccgtccgtccccacagaaagaaaagtaaactgttttcgcggctgcgcagaaagaagaacatggtacgtgcagtgagtgctgcggaggggcgcagaggcccgcgccctggctggccctgtgcatgcgccttgcgccctgctcccaggtgctcactaacccgtaatctggctctgtgtgcagtgctgcccggcagggctgtcgtgtgcgtgttgggtgggaaggcggaggcggcgcggggcgggctggcctctgagcatctggctgcatttagcacg

SEQ ID NO: 304 - DNA, 503 bp, synthetic construct
  misc_feature 1..503: note = Synthetic
  source 1..503: mol_type = other DNA
gagcctcctgcccctcaccaggccctgttagcatcacctcgggcacctggccacagcaggggccagtcagggcaccccgggatagcacgcccaggccctgtgcaaggcctctggcacttaggagaggcttttgcccctttgtcctctgagcagaagggttggcaaagagggaaggggacaggccagttctgcacctggcctttctccagaatgaaggcctccacccaccgtccgtccccacagaaagaaaagtaaactgttttcgcggctgcgcagaaagaagaacatggtacgtgcagtgagtgctgcggaggggcgcagaggcccgcgccctggctggccctgtgcatgcgccttgcgccctgctcccaggtgctcactaacccgtaatctggctctgtgtgcatgtgctgcccggcagggctgtcgtgtgcgtgttgggtgggaaggcggaggcggcgcggggcgggctggcctctgagcatctggctgcatttagcacg

SEQ ID NO: 305 - DNA, 504 bp, synthetic construct
  misc_feature 1..504: note = Synthetic
  source 1..504: mol_type = other DNA
gagcctcctgcccctcaccaggccctgttagcatcacctcgggcacctggccacagcaggggccagtcagggcaccccgggatagcacgcccaggccctgtgcaaggcctctggcacttaggagaggcttttgcccctttgtcctctgagcagaagggttggcaaagagggaaggggacaggccagttctgcacctggcctttctccagaatgaaggcctccacccaccgtccgtccccacagaaagaaaagtaaactgttttcgcggctgcgcagaaagaagaacatggtacgtgcagtgagtgctgcggaggggcgcagaggcccgcgccctggctggccctgtgcatgcgccttgcgccctgctcccaggtgctcactaacccgtaatctgctgctctgtgtgcagtgctgcccggcagggctgtcgtgtgcgtgttgggtgggaaggcggaggcggcgcggggcgggctggcctctgagcatctggctgcatttagcacg

SEQ ID NO: 306 - DNA, 505 bp, synthetic construct
  misc_feature 1..505: note = Synthetic
  source 1..505: mol_type = other DNA
gagcctcctgcccctcaccaggccctgttagcatcacctcgggcacctggccacagcaggggccagtcagggcaccccgggatagcacgcccaggccctgtgcaaggcctctggcacttaggagaggcttttgcccctttgtcctctgagcagaagggttggcaaagagggaaggggacaggccagttctgcacctggcctttctccagaatgaaggcctccacccaccgtccgtccccacagaaagaaaagtaaactgttttcgcggctgcgcagaaagaagaacatggtacgtgcagtgagtgctgcggaggggcgcagaggcccgcgccctggctggccctgtgcatgcgccttgcgccctgctcccaggtgctcactaacccgtaatctgctgctctgtgtgcatgtgctgcccggcagggctgtcgtgtgcgtgttgggtgggaaggcggaggcggcgcggggcgggctggcctctgagcatctggctgcatttagcacg

SEQ ID NO: 307 - DNA, 502 bp, synthetic construct
  misc_feature 1..502: note = Synthetic
  source 1..502: mol_type = other DNA
gagcctcctgcccctcaccaggccctgttagcatcacctcgggcacctggccacagcaggggccagtcagggcaccccgggatagcacgcccaggccctgtgcaaggcctctggcacttaggagaggcttttgcccctttgtcctctgagcagaagggttggcaaagagggaaggggacaggccagttctgcacctggcctttctccagaatgaaggcctccacccaccgtccgtccccacagaaagaaaagtaaactgttttcgcggctgcgcagaaagaagaacatggtacgtgcagtgagtgctgcggaggggcgcagaggcccgcgccctggctggccctgtgcatgctgccttgcgccctgctcccaggtgccactaacccgtaatctggctctgtgtgcagtgctgcccggcagggctgtcgtgtgcgtgttgggtgggaaggcggaggcggcgcggggcgggctggcctctgagcatctggctgcatttagcacg

SEQ ID NO: 308 - DNA, 503 bp, synthetic construct
  misc_feature 1..503: note = Synthetic
  source 1..503: mol_type = other DNA
gagcctcctgcccctcaccaggccctgttagcatcacctcgggcacctggccacagcaggggccagtcagggcaccccgggatagcacgcccaggccctgtgcaaggcctctggcacttaggagaggcttttgcccctttgtcctctgagcagaagggttggcaaagagggaaggggacaggccagttctgcacctggcctttctccagaatgaaggcctccacccaccgtccgtccccacagaaagaaaagtaaactgttttcgcggctgcgcagaaagaagaacatggtacgtgcagtgagtgctgcggaggggcgcagaggcccgcgccctggctggccctgtgcatgctgccttgcgccctgctcccaggtgccactaacccgtaatctggctctgtgtgcatgtgctgcccggcagggctgtcgtgtgcgtgttgggtgggaaggcggaggcggcgcggggcgggctggcctctgagcatctggctgcatttagcacg

SEQ ID NO: 309 - DNA, 504 bp, synthetic construct
  misc_feature 1..504: note = Synthetic
  source 1..504: mol_type = other DNA
gagcctcctgcccctcaccaggccctgttagcatcacctcgggcacctggccacagcaggggccagtcagggcaccccgggatagcacgcccaggccctgtgcaaggcctctggcacttaggagaggcttttgcccctttgtcctctgagcagaagggttggcaaagagggaaggggacaggccagttctgcacctggcctttctccagaatgaaggcctccacccaccgtccgtccccacagaaagaaaagtaaactgttttcgcggctgcgcagaaagaagaacatggtacgtgcagtgagtgctgcggaggggcgcagaggcccgcgccctggctggccctgtgcatgctgccttgcgccctgctcccaggtgccactaacccgtaatctgctgctctgtgtgcagtgctgcccggcagggctgtcgtgtgcgtgttgggtgggaaggcggaggcggcgcggggcgggctggcctctgagcatctggctgcatttagcacg

SEQ ID NO: 310 - DNA, 505 bp, synthetic construct
  misc_feature 1..505: note = Synthetic
  source 1..505: mol_type = other DNA
gagcctcctgcccctcaccaggccctgttagcatcacctcgggcacctggccacagcaggggccagtcagggcaccccgggatagcacgcccaggccctgtgcaaggcctctggcacttaggagaggcttttgcccctttgtcctctgagcagaagggttggcaaagagggaaggggacaggccagttctgcacctggcctttctccagaatgaaggcctccacccaccgtccgtccccacagaaagaaaagtaaactgttttcgcggctgcgcagaaagaagaacatggtacgtgcagtgagtgctgcggaggggcgcagaggcccgcgccctggctggccctgtgcatgctgccttgcgccctgctcccaggtgccactaacccgtaatctgctgctctgtgtgcatgtgctgcccggcagggctgtcgtgtgcgtgttgggtgggaaggcggaggcggcgcggggcgggctggcctctgagcatctggctgcatttagcacg

SEQ ID NO: 311 - DNA, 503 bp, synthetic construct
  misc_feature 1..503: note = Synthetic
  source 1..503: mol_type = other DNA
gagcctcctgcccctcaccaggccctgttagcatcacctcgggcacctggccacagcaggggccagtcagggcaccccgggatagcacgcccaggccctgtgcaaggcctctggcacttaggagaggcttttgcccctttgtcctctgagcagaagggttggcaaagagggaaggggacaggccagttctgcacctggcctttctccagaatgaaggcctccacccaccgtccgtccccacagaaagaaaagtaaactgttttcgcggctgcgcagaaagaagaacatggtacgtgcagtgagtgctgcggaggggcgcagaggcccgcgccctggctggccctgtgcatgctgccttgcgccctgctcccaggtgctcactaacccgtaatctggctctgtgtgcagtgctgcccggcagggctgtcgtgtgcgtgttgggtgggaaggcggaggcggcgcggggcgggctggcctctgagcatctggctgcatttagcacg

SEQ ID NO: 312 - DNA, 504 bp, synthetic construct
  misc_feature 1..504: note = Synthetic
  source 1..504: mol_type = other DNA
gagcctcctgcccctcaccaggccctgttagcatcacctcgggcacctggccacagcaggggccagtcagggcaccccgggatagcacgcccaggccctgtgcaaggcctctggcacttaggagaggcttttgcccctttgtcctctgagcagaagggttggcaaagagggaaggggacaggccagttctgcacctggcctttctccagaatgaaggcctccacccaccgtccgtccccacagaaagaaaagtaaactgttttcgcggctgcgcagaaagaagaacatggtacgtgcagtgagtgctgcggaggggcgcagaggcccgcgccctggctggccctgtgcatgctgccttgcgccctgctcccaggtgctcactaacccgtaatctggctctgtgtgcatgtgctgcccggcagggctgtcgtgtgcgtgttgggtgggaaggcggaggcggcgcggggcgggctggcctctgagcatctggctgcatttagcacg

SEQ ID NO: 313 - DNA, 505 bp, synthetic construct
  misc_feature 1..505: note = Synthetic
  source 1..505: mol_type = other DNA
gagcctcctgcccctcaccaggccctgttagcatcacctcgggcacctggccacagcaggggccagtcagggcaccccgggatagcacgcccaggccctgtgcaaggcctctggcacttaggagaggcttttgcccctttgtcctctgagcagaagggttggcaaagagggaaggggacaggccagttctgcacctggcctttctccagaatgaaggcctccacccaccgtccgtccccacagaaagaaaagtaaactgttttcgcggctgcgcagaaagaagaacatggtacgtgcagtgagtgctgcggaggggcgcagaggcccgcgccctggctggccctgtgcatgctgccttgcgccctgctcccaggtgctcactaacccgtaatctgctgctctgtgtgcagtgctgcccggcagggctgtcgtgtgcgtgttgggtgggaaggcggaggcggcgcggggcgggctggcctctgagcatctggctgcatttagcacg

SEQ ID NO: 314 - DNA, 506 bp, synthetic construct
  misc_feature 1..506: note = Synthetic
  source 1..506: mol_type = other DNA
gagcctcctgcccctcaccaggccctgttagcatcacctcgggcacctggccacagcaggggccagtcagggcaccccgggatagcacgcccaggccctgtgcaaggcctctggcacttaggagaggcttttgcccctttgtcctctgagcagaagggttggcaaagagggaaggggacaggccagttctgcacctggcctttctccagaatgaaggcctccacccaccgtccgtccccacagaaagaaaagtaaactgttttcgcggctgcgcagaaagaagaacatggtacgtgcagtgagtgctgcggaggggcgcagaggcccgcgccctggctggccctgtgcatgctgccttgcgccctgctcccaggtgctcactaacccgtaatctgctgctctgtgtgcatgtgctgcccggcagggctgtcgtgtgcgtgttgggtgggaaggcggaggcggcgcggggcgggctggcctctgagcatctggctgcatttagcacg

SEQ ID NO: 315 - DNA, 501 bp, synthetic construct
  misc_feature 1..501: note = Synthetic
  source 1..501: mol_type = other DNA
gagcctcctgcccctcaccaggccctgttagcatcacctcgggcacctggccacagcaggggccagtcagggcaccccgggatagcacgcccaggccctgtgcaaggcctctggcacttaggagaggcttttgcccctttgtcctctgagcagaagggttggcaaagagggaaggggacaggccagttctgcacctggcctttctccagaatgaaggcctccacccaccgtccgtccccacagaaagaaaagtaaactgttttcgcggctgcgcagaaagaagaacatggtaagtgcagtgagtgctgcggaggggcgcagaggcccgcgccctggctggccctgtgcatgcgccttgcgccctgctcccaggtgccactaacccgtaatctggctctgtgtgcagtgctgcccggcagggctgtcgtgtgcgtgttgggtgggaaggcggaggcggcgcggggcgggctggcctctgagcatctggctgcatttagcacg

SEQ ID NO: 316 - DNA, 502 bp, synthetic construct
  misc_feature 1..502: note = Synthetic
  source 1..502: mol_type = other DNA
gagcctcctgcccctcaccaggccctgttagcatcacctcgggcacctggccacagcaggggccagtcagggcaccccgggatagcacgcccaggccctgtgcaaggcctctggcacttaggagaggcttttgcccctttgtcctctgagcagaagggttggcaaagagggaaggggacaggccagttctgcacctggcctttctccagaatgaaggcctccacccaccgtccgtccccacagaaagaaaagtaaactgttttcgcggctgcgcagaaagaagaacatggtaagtgcagtgagtgctgcggaggggcgcagaggcccgcgccctggctggccctgtgcatgcgccttgcgccctgctcccaggtgccactaacccgtaatctggctctgtgtgcatgtgctgcccggcagggctgtcgtgtgcgtgttgggtgggaaggcggaggcggcgcggggcgggctggcctctgagcatctggctgcatttagcacg

SEQ ID NO: 317 - DNA, 503 bp, synthetic construct
  misc_feature 1..503: note = Synthetic
  source 1..503: mol_type = other DNA
gagcctcctgcccctcaccaggccctgttagcatcacctcgggcacctggccacagcaggggccagtcagggcaccccgggatagcacgcccaggccctgtgcaaggcctctggcacttaggagaggcttttgcccctttgtcctctgagcagaagggttggcaaagagggaaggggacaggccagttctgcacctggcctttctccagaatgaaggcctccacccaccgtccgtccccacagaaagaaaagtaaactgttttcgcggctgcgcagaaagaagaacatggtaagtgcagtgagtgctgcggaggggcgcagaggcccgcgccctggctggccctgtgcatgcgccttgcgccctgctcccaggtgccactaacccgtaatctgctgctctgtgtgcagtgctgcccggcagggctgtcgtgtgcgtgttgggtgggaaggcggaggcggcgcggggcgggctggcctctgagcatctggctgcatttagcacg

SEQ ID NO: 318 - DNA, 504 bp, synthetic construct
  misc_feature 1..504: note = Synthetic
  source 1..504: mol_type = other DNA
gagcctcctgcccctcaccaggccctgttagcatcacctcgggcacctggccacagcaggggccagtcagggcaccccgggatagcacgcccaggccctgtgcaaggcctctggcacttaggagaggcttttgcccctttgtcctctgagcagaagggttggcaaagagggaaggggacaggccagttctgcacctggcctttctccagaatgaaggcctccacccaccgtccgtccccacagaaagaaaagtaaactgttttcgcggctgcgcagaaagaagaacatggtaagtgcagtgagtgctgcggaggggcgcagaggcccgcgccctggctggccctgtgcatgcgccttgcgccctgctcccaggtgccactaacccgtaatctgctgctctgtgtgcatgtgctgcccggcagggctgtcgtgtgcgtgttgggtgggaaggcggaggcggcgcggggcgggctggcctctgagcatctggctgcatttagcacg

SEQ ID NO: 319 - DNA, 502 bp, synthetic construct
  misc_feature 1..502: note = Synthetic
  source 1..502: mol_type = other DNA
gagcctcctgcccctcaccaggccctgttagcatcacctcgggcacctggccacagcaggggccagtcagggcaccccgggatagcacgcccaggccctgtgcaaggcctctggcacttaggagaggcttttgcccctttgtcctctgagcagaagggttggcaaagagggaaggggacaggccagttctgcacctggcctttctccagaatgaaggcctccacccaccgtccgtccccacagaaagaaaagtaaactgttttcgcggctgcgcagaaagaagaacatggtaagtgcagtgagtgctgcggaggggcgcagaggcccgcgccctggctggccctgtgcatgcgccttgcgccctgctcccaggtgctcactaacccgtaatctggctctgtgtgcagtgctgcccggcagggctgtcgtgtgcgtgttgggtgggaaggcggaggcggcgcggggcgggctggcctctgagcatctggctgcatttagcacg

SEQ ID NO: 320 - DNA, 503 bp, synthetic construct
  misc_feature 1..503: note = Synthetic
  source 1..503: mol_type = other DNA
gagcctcctgcccctcaccaggccctgttagcatcacctcgggcacctggccacagcaggggccagtcagggcaccccgggatagcacgcccaggccctgtgcaaggcctctggcacttaggagaggcttttgcccctttgtcctctgagcagaagggttggcaaagagggaaggggacaggccagttctgcacctggcctttctccagaatgaaggcctccacccaccgtccgtccccacagaaagaaaagtaaactgttttcgcggctgcgcagaaagaagaacatggtaagtgcagtgagtgctgcggaggggcgcagaggcccgcgccctggctggccctgtgcatgcgccttgcgccctgctcccaggtgctcactaacccgtaatctggctctgtgtgcatgtgctgcccggcagggctgtcgtgtgcgtgttgggtgggaaggcggaggcggcgcggggcgggctggcctctgagcatctggctgcatttagcacg

SEQ ID NO: 321 - DNA, 504 bp, synthetic construct
  misc_feature 1..504: note = Synthetic
  source 1..504: mol_type = other DNA
gagcctcctgcccctcaccaggccctgttagcatcacctcgggcacctggccacagcaggggccagtcagggcaccccgggatagcacgcccaggccctgtgcaaggcctctggcacttaggagaggcttttgcccctttgtcctctgagcagaagggttggcaaagagggaaggggacaggccagttctgcacctggcctttctccagaatgaaggcctccacccaccgtccgtccccacagaaagaaaagtaaactgttttcgcggctgcgcagaaagaagaacatggtaagtgcagtgagtgctgcggaggggcgcagaggcccgcgccctggctggccctgtgcatgcgccttgcgccctgctcccaggtgctcactaacccgtaatctgctgctctgtgtgcagtgctgcccggcagggctgtcgtgtgcgtgttgggtgggaaggcggaggcggcgcggggcgggctggcctctgagcatctggctgcatttagcacg

SEQ ID NO: 322 - DNA, 505 bp, synthetic construct
  misc_feature 1..505: note = Synthetic
  source 1..505: mol_type = other DNA
gagcctcctgcccctcaccaggccctgttagcatcacctcgggcacctggccacagcaggggccagtcagggcaccccgggatagcacgcccaggccctgtgcaaggcctctggcacttaggagaggcttttgcccctttgtcctctgagcagaagggttggcaaagagggaaggggacaggccagttctgcacctggcctttctccagaatgaaggcctccacccaccgtccgtccccacagaaagaaaagtaaactgttttcgcggctgcgcagaaagaagaacatggtaagtgcagtgagtgctgcggaggggcgcagaggcccgcgccctggctggccctgtgcatgcgccttgcgccctgctcccaggtgctcactaacccgtaatctgctgctctgtgtgcatgtgctgcccggcagggctgtcgtgtgcgtgttgggtgggaaggcggaggcggcgcggggcgggctggcctctgagcatctggctgcatttagcacg

SEQ ID NO: 323 - DNA, 502 bp, synthetic construct
  misc_feature 1..502: note = Synthetic
  source 1..502: mol_type = other DNA
gagcctcctgcccctcaccaggccctgttagcatcacctcgggcacctggccacagcaggggccagtcagggcaccccgggatagcacgcccaggccctgtgcaaggcctctggcacttaggagaggcttttgcccctttgtcctctgagcagaagggttggcaaagagggaaggggacaggccagttctgcacctggcctttctccagaatgaaggcctccacccaccgtccgtccccacagaaagaaaagtaaactgttttcgcggctgcgcagaaagaagaacatggtaagtgcagtgagtgctgcggaggggcgcagaggcccgcgccctggctggccctgtgcatgctgccttgcgccctgctcccaggtgccactaacccgtaatctggctctgtgtgcagtgctgcccggcagggctgtcgtgtgcgtgttgggtgggaaggcggaggcggcgcggggcgggctggcctctgagcatctggctgcatttagcacg

SEQ ID NO: 324 - DNA, 503 bp, synthetic construct
  misc_feature 1..503: note = Synthetic
  source 1..503: mol_type = other DNA
gagcctcctgcccctcaccaggccctgttagcatcacctcgggcacctggccacagcaggggccagtcagggcaccccgggatagcacgcccaggccctgtgcaaggcctctggcacttaggagaggcttttgcccctttgtcctctgagcagaagggttggcaaagagggaaggggacaggccagttctgcacctggcctttctccagaatgaaggcctccacccaccgtccgtccccacagaaagaaaagtaaactgttttcgcggctgcgcagaaagaagaacatggtaagtgcagtgagtgctgcggaggggcgcagaggcccgcgccctggctggccctgtgcatgctgccttgcgccctgctcccaggtgccactaacccgtaatctggctctgtgtgcatgtgctgcccggcagggctgtcgtgtgcgtgttgggtgggaaggcggaggcggcgcggggcgggctggcctctgagcatctggctgcatttagcacg

SEQ ID NO: 325 - DNA, 504 bp, synthetic construct
  misc_feature 1..504: note = Synthetic
  source 1..504: mol_type = other DNA
gagcctcctgcccctcaccaggccctgttagcatcacctcgggcacctggccacagcaggggccagtcagggcaccccgggatagcacgcccaggccctgtgcaaggcctctggcacttaggagaggcttttgcccctttgtcctctgagcagaagggttggcaaagagggaaggggacaggccagttctgcacctggcctttctccagaatgaaggcctccacccaccgtccgtccccacagaaagaaaagtaaactgttttcgcggctgcgcagaaagaagaacatggtaagtgcagtgagtgctgcggaggggcgcagaggcccgcgccctggctggccctgtgcatgctgccttgcgccctgctcccaggtgccactaacccgtaatctgctgctctgtgtgcagtgctgcccggcagggctgtcgtgtgcgtgttgggtgggaaggcggaggcggcgcggggcgggctggcctctgagcatctggctgcatttagcacg

SEQ ID NO: 326 - DNA, 505 bp, synthetic construct
  misc_feature 1..505: note = Synthetic
  source 1..505: mol_type = other DNA
gagcctcctgcccctcaccaggccctgttagcatcacctcgggcacctggccacagcaggggccagtcagggcaccccgggatagcacgcccaggccctgtgcaaggcctctggcacttaggagaggcttttgcccctttgtcctctgagcagaagggttggcaaagagggaaggggacaggccagttctgcacctggcctttctccagaatgaaggcctccacccaccgtccgtccccacagaaagaaaagtaaactgttttcgcggctgcgcagaaagaagaacatggtaagtgcagtgagtgctgcggaggggcgcagaggcccgcgccctggctggccctgtgcatgctgccttgcgccctgctcccaggtgccactaacccgtaatctgctgctctgtgtgcatgtgctgcccggcagggctgtcgtgtgcgtgttgggtgggaaggcggaggcggcgcggggcgggctggcctctgagcatctggctgcatttagcacg

SEQ ID NO: 327 - DNA, 503 bp, synthetic construct
  misc_feature 1..503: note = Synthetic
  source 1..503: mol_type = other DNA
gagcctcctgcccctcaccaggccctgttagcatcacctcgggcacctggccacagcaggggccagtcagggcaccccgggatagcacgcccaggccctgtgcaaggcctctggcacttaggagaggcttttgcccctttgtcctctgagcagaagggttggcaaagagggaaggggacaggccagttctgcacctggcctttctccagaatgaaggcctccacccaccgtccgtccccacagaaagaaaagtaaactgttttcgcggctgcgcagaaagaagaacatggtaagtgcagtgagtgctgcggaggggcgcagaggcccgcgccctggctggccctgtgcatgctgccttgcgccctgctcccaggtgctcactaacccgtaatctggctctgtgtgcagtgctgcccggcagggctgtcgtgtgcgtgttgggtgggaaggcggaggcggcgcggggcgggctggcctctgagcatctggctgcatttagcacg

SEQ ID NO: 328 - DNA, 504 bp, synthetic construct
  misc_feature 1..504: note = Synthetic
  source 1..504: mol_type = other DNA
gagcctcctgcccctcaccaggccctgttagcatcacctcgggcacctggccacagcaggggccagtcagggcaccccgggatagcacgcccaggccctgtgcaaggcctctggcacttaggagaggcttttgcccctttgtcctctgagcagaagggttggcaaagagggaaggggacaggccagttctgcacctggcctttctccagaatgaaggcctccacccaccgtccgtccccacagaaagaaaagtaaactgttttcgcggctgcgcagaaagaagaacatggtaagtgcagtgagtgctgcggaggggcgcagaggcccgcgccctggctggccctgtgcatgctgccttgcgccctgctcccaggtgctcactaacccgtaatctggctctgtgtgcatgtgctgcccggcagggctgtcgtgtgcgtgttgggtgggaaggcggaggcggcgcggggcgggctggcctctgagcatctggctgcatttagcacg

SEQ ID NO: 329 - DNA, 505 bp, synthetic construct
  misc_feature 1..505: note = Synthetic
  source 1..505: mol_type = other DNA
gagcctcctgcccctcaccaggccctgttagcatcacctcgggcacctggccacagcaggggccagtcagggcaccccgggatagcacgcccaggccctgtgcaaggcctctggcacttaggagaggcttttgcccctttgtcctctgagcagaagggttggcaaagagggaaggggacaggccagttctgcacctggcctttctccagaatgaaggcctccacccaccgtccgtccccacagaaagaaaagtaaactgttttcgcggctgcgcagaaagaagaacatggtaagtgcagtgagtgctgcggaggggcgcagaggcccgcgccctggctggccctgtgcatgctgccttgcgccctgctcccaggtgctcactaacccgtaatctgctgctctgtgtgcagtgctgcccggcagggctgtcgtgtgcgtgttgggtgggaaggcggaggcggcgcggggcgggctggcctctgagcatctggctgcatttagcacg

SEQ ID NO: 330 - DNA, 506 bp, synthetic construct
  misc_feature 1..506: note = Synthetic
  source 1..506: mol_type = other DNA
gagcctcctgcccctcaccaggccctgttagcatcacctcgggcacctggccacagcaggggccagtcagggcaccccgggatagcacgcccaggccctgtgcaaggcctctggcacttaggagaggcttttgcccctttgtcctctgagcagaagggttggcaaagagggaaggggacaggccagttctgcacctggcctttctccagaatgaaggcctccacccaccgtccgtccccacagaaagaaaagtaaactgttttcgcggctgcgcagaaagaagaacatggtaagtgcagtgagtgctgcggaggggcgcagaggcccgcgccctggctggccctgtgcatgctgccttgcgccctgctcccaggtgctcactaacccgtaatctgctgctctgtgtgcatgtgctgcccggcagggctgtcgtgtgcgtgttgggtgggaaggcggaggcggcgcggggcgggctggcctctgagcatctggctgcatttagcacg

SEQ ID NO: 331 - DNA, 501 bp, synthetic construct
  misc_feature 1..501: note = Synthetic
  source 1..501: mol_type = other DNA
gagcctcctgcccctcaccaggccctgttagcatcacctcgggcacctggccacagcaggggccagtcagggcaccccgggatagcacgcccaggccctgtgcaaggcctctggcacttaggagaggcttttgcccctttgtcctctgagcagaagggttggcaaagagggaaggggacaggccagttctgcacctggcctttctccagaatgaaggcctccacccaccgtccgtccccacagaaagaaaagtaaactgttttcgcggctgcgcagaaagaagaacatggtaggtgcagtgagtgctgcggaggggcgcagaggcccgcgccctggctggccctgtgcatgcgccttgcgccctgctcccaggtgccactaacccgtaatctggctctgtgtgcagtgctgcccggcagggctgtcgtgtgcgtgttgggtgggaaggcggaggcggcgcggggcgggctggcctctgagcatctggctgcatttagcacg

SEQ ID NO: 332 - DNA, 502 bp, synthetic construct
  misc_feature 1..502: note = Synthetic
  source 1..502: mol_type = other DNA
gagcctcctgcccctcaccaggccctgttagcatcacctcgggcacctggccacagcaggggccagtcagggcaccccgggatagcacgcccaggccctgtgcaaggcctctggcacttaggagaggcttttgcccctttgtcctctgagcagaagggttggcaaagagggaaggggacaggccagttctgcacctggcctttctccagaatgaaggcctccacccaccgtccgtccccacagaaagaaaagtaaactgttttcgcggctgcgcagaaagaagaacatggtaggtgcagtgagtgctgcggaggggcgcagaggcccgcgccctggctggccctgtgcatgcgccttgcgccctgctcccaggtgccactaacccgtaatctggctctgtgtgcatgtgctgcccggcagggctgtcgtgtgcgtgttgggtgggaaggcggaggcggcgcggggcgggctggcctctgagcatctggctgcatttagcacg

SEQ ID NO: 333 - DNA, 503 bp, synthetic construct
  misc_feature 1..503: note = Synthetic
  source 1..503: mol_type = other DNA
gagcctcctgcccctcaccaggccctgttagcatcacctcgggcacctggccacagcaggggccagtcagggcaccccgggatagcacgcccaggccctgtgcaaggcctctggcacttaggagaggcttttgcccctttgtcctctgagcagaagggttggcaaagagggaaggggacaggccagttctgcacctggcctttctccagaatgaaggcctccacccaccgtccgtccccacagaaagaaaagtaaactgttttcgcggctgcgcagaaagaagaacatggtaggtgcagtgagtgctgcggaggggcgcagaggcccgcgccctggctggccctgtgcatgcgccttgcgccctgctcccaggtgccactaacccgtaatctgctgctctgtgtgcagtgctgcccggcagggctgtcgtgtgcgtgttgggtgggaaggcggaggcggcgcggggcgggctggcctctgagcatctggctgcatttagcacg

SEQ ID NO: 334 - DNA, 504 bp, synthetic construct
  misc_feature 1..504: note = Synthetic
  source 1..504: mol_type = other DNA
gagcctcctgcccctcaccaggccctgttagcatcacctcgggcacctggccacagcaggggccagtcagggcaccccgggatagcacgcccaggccctgtgcaaggcctctggcacttaggagaggcttttgcccctttgtcctctgagcagaagggttggcaaagagggaaggggacaggccagttctgcacctggcctttctccagaatgaaggcctccacccaccgtccgtccccacagaaagaaaagtaaactgttttcgcggctgcgcagaaagaagaacatggtaggtgcagtgagtgctgcggaggggcgcagaggcccgcgccctggctggccctgtgcatgcgccttgcgccctgctcccaggtgccactaacccgtaatctgctgctctgtgtgcatgtgctgcccggcagggctgtcgtgtgcgtgttgggtgggaaggcggaggcggcgcggggcgggctggcctctgagcatctggctgcatttagcacg

SEQ ID NO: 335 - DNA, 502 bp, synthetic construct
  misc_feature 1..502: note = Synthetic
  source 1..502: mol_type = other DNA
gagcctcctgcccctcaccaggccctgttagcatcacctcgggcacctggccacagcaggggccagtcagggcaccccgggatagcacgcccaggccctgtgcaaggcctctggcacttaggagaggcttttgcccctttgtcctctgagcagaagggttggcaaagagggaaggggacaggccagttctgcacctggcctttctccagaatgaaggcctccacccaccgtccgtccccacagaaagaaaagtaaactgttttcgcggctgcgcagaaagaagaacatggtaggtgcagtgagtgctgcggaggggcgcagaggcccgcgccctggctggccctgtgcatgcgccttgcgccctgctcccaggtgctcactaacccgtaatctggctctgtgtgcagtgctgcccggcagggctgtcgtgtgcgtgttgggtgggaaggcggaggcggcgcggggcgggctggcctctgagcatctggctgcatttagcacg

SEQ ID NO: 336 - DNA, 503 bp, synthetic construct
  misc_feature 1..503: note = Synthetic
  source 1..503: mol_type = other DNA
gagcctcctgcccctcaccaggccctgttagcatcacctcgggcacctggccacagcaggggccagtcagggcaccccgggatagcacgcccaggccctgtgcaaggcctctggcacttaggagaggcttttgcccctttgtcctctgagcagaagggttggcaaagagggaaggggacaggccagttctgcacctggcctttctccagaatgaaggcctccacccaccgtccgtccccacagaaagaaaagtaaactgttttcgcggctgcgcagaaagaagaacatggtaggtgcagtgagtgctgcggaggggcgcagaggcccgcgccctggctggccctgtgcatgcgccttgcgccctgctcccaggtgctcactaacccgtaatctggctctgtgtgcatgtgctgcccggcagggctgtcgtgtgcgtgttgggtgggaaggcggaggcggcgcggggcgggctggcctctgagcatctggctgcatttagcacg

SEQ ID NO: 337 - DNA, 504 bp, synthetic construct
  misc_feature 1..504: note = Synthetic
  source 1..504: mol_type = other DNA
gagcctcctgcccctcaccaggccctgttagcatcacctcgggcacctggccacagcaggggccagtcagggcaccccgggatagcacgcccaggccctgtgcaaggcctctggcacttaggagaggcttttgcccctttgtcctctgagcagaagggttggcaaagagggaaggggacaggccagttctgcacctggcctttctccagaatgaaggcctccacccaccgtccgtccccacagaaagaaaagtaaactgttttcgcggctgcgcagaaagaagaacatggtaggtgcagtgagtgctgcggaggggcgcagaggcccgcgccctggctggccctgtgcatgcgccttgcgccctgctcccaggtgctcactaacccgtaatctgctgctctgtgtgcagtgctgcccggcagggctgtcgtgtgcgtgttgggtgggaaggcggaggcggcgcggggcgggctggcctctgagcatctggctgcatttagcacg

SEQ ID NO: 338 - DNA, 505 bp, synthetic construct
  misc_feature 1..505: note = Synthetic
  source 1..505: mol_type = other DNA
gagcctcctgcccctcaccaggccctgttagcatcacctcgggcacctggccacagcaggggccagtcagggcaccccgggatagcacgcccaggccctgtgcaaggcctctggcacttaggagaggcttttgcccctttgtcctctgagcagaagggttggcaaagagggaaggggacaggccagttctgcacctggcctttctccagaatgaaggcctccacccaccgtccgtccccacagaaagaaaagtaaactgttttcgcggctgcgcagaaagaagaacatggtaggtgcagtgagtgctgcggaggggcgcagaggcccgcgccctggctggccctgtgcatgcgccttgcgccctgctcccaggtgctcactaacccgtaatctgctgctctgtgtgcatgtgctgcccggcagggctgtcgtgtgcgtgttgggtgggaaggcggaggcggcgcggggcgggctggcctctgagcatctggctgcatttagcacg

SEQ ID NO: 339 - DNA, 502 bp, synthetic construct
  misc_feature 1..502: note = Synthetic
  source 1..502: mol_type = other DNA
gagcctcctgcccctcaccaggccctgttagcatcacctcgggcacctggccacagcaggggccagtcagggcaccccgggatagcacgcccaggccctgtgcaaggcctctggcacttaggagaggcttttgcccctttgtcctctgagcagaagggttggcaaagagggaaggggacaggccagttctgcacctggcctttctccagaatgaaggcctccacccaccgtccgtccccacagaaagaaaagtaaactgttttcgcggctgcgcagaaagaagaacatggtaggtgcagtgagtgctgcggaggggcgcagaggcccgcgccctggctggccctgtgcatgctgccttgcgccctgctcccaggtgccactaacccgtaatctggctctgtgtgcagtgctgcccggcagggctgtcgtgtgcgtgttgggtgggaaggcggaggcggcgcggggcgggctggcctctgagcatctggctgcatttagcacg

SEQ ID NO: 340 - DNA, 503 bp, synthetic construct
  misc_feature 1..503: note = Synthetic
  source 1..503: mol_type = other DNA
gagcctcctgcccctcaccaggccctgttagcatcacctcgggcacctggccacagcaggggccagtcagggcaccccgggatagcacgcccaggccctgtgcaaggcctctggcacttaggagaggcttttgcccctttgtcctctgagcagaagggttggcaaagagggaaggggacaggccagttctgcacctggcctttctccagaatgaaggcctccacccaccgtccgtccccacagaaagaaaagtaaactgttttcgcggctgcgcagaaagaagaacatggtaggtgcagtgagtgctgcggaggggcgcagaggcccgcgccctggctggccctgtgcatgctgccttgcgccctgctcccaggtgccactaacccgtaatctggctctgtgtgcatgtgctgcccggcagggctgtcgtgtgcgtgttgggtgggaaggcggaggcggcgcggggcgggctggcctctgagcatctggctgcatttagcacg

SEQ ID NO: 341 - DNA, 504 bp, synthetic construct
  misc_feature 1..504: note = Synthetic
  source 1..504: mol_type = other DNA
gagcctcctgcccctcaccaggccctgttagcatcacctcgggcacctggccacagcaggggccagtcagggcaccccgggatagcacgcccaggccctgtgcaaggcctctggcacttaggagaggcttttgcccctttgtcctctgagcagaagggttggcaaagagggaaggggacaggccagttctgcacctggcctttctccagaatgaaggcctccacccaccgtccgtccccacagaaagaaaagtaaactgttttcgcggctgcgcagaaagaagaacatggtaggtgcagtgagtgctgcggaggggcgcagaggcccgcgccctggctggccctgtgcatgctgccttgcgccctgctcccaggtgccactaacccgtaatctgctgctctgtgtgcagtgctgcccggcagggctgtcgtgtgcgtgttgggtgggaaggcggaggcggcgcggggcgggctggcctctgagcatctggctgcatttagcacg

SEQ ID NO: 342 - DNA, 505 bp, synthetic construct
  misc_feature 1..505: note = Synthetic
  source 1..505: mol_type = other DNA
gagcctcctgcccctcaccaggccctgttagcatcacctcgggcacctggccacagcaggggccagtcagggcaccccgggatagcacgcccaggccctgtgcaaggcctctggcacttaggagaggcttttgcccctttgtcctctgagcagaagggttggcaaagagggaaggggacaggccagttctgcacctggcctttctccagaatgaaggcctccacccaccgtccgtccccacagaaagaaaagtaaactgttttcgcggctgcgcagaaagaagaacatggtaggtgcagtgagtgctgcggaggggcgcagaggcccgcgccctggctggccctgtgcatgctgccttgcgccctgctcccaggtgccactaacccgtaatctgctgctctgtgtgcatgtgctgcccggcagggctgtcgtgtgcgtgttgggtgggaaggcggaggcggcgcggggcgggctggcctctgagcatctggctgcatttagcacg

SEQ ID NO: 343 - DNA, 503 bp, synthetic construct
  misc_feature 1..503: note = Synthetic
  source 1..503: mol_type = other DNA
gagcctcctgcccctcaccaggccctgttagcatcacctcgggcacctggccacagcaggggccagtcagggcaccccgggatagcacgcccaggccctgtgcaaggcctctggcacttaggagaggcttttgcccctttgtcctctgagcagaagggttggcaaagagggaaggggacaggccagttctgcacctggcctttctccagaatgaaggcctccacccaccgtccgtccccacagaaagaaaagtaaactgttttcgcggctgcgcagaaagaagaacatggtaggtgcagtgagtgctgcggaggggcgcagaggcccgcgccctggctggccctgtgcatgctgccttgcgccctgctcccaggtgctcactaacccgtaatctggctctgtgtgcagtgctgcccggcagggctgtcgtgtgcgtgttgggtgggaaggcggaggcggcgcggggcgggctggcctctgagcatctggctgcatttagcacg

SEQ ID NO: 344 - DNA, 504 bp, synthetic construct
  misc_feature 1..504: note = Synthetic
  source 1..504: mol_type = other DNA
gagcctcctgcccctcaccaggccctgttagcatcacctcgggcacctggccacagcaggggccagtcagggcaccccgggatagcacgcccaggccctgtgcaaggcctctggcacttaggagaggcttttgcccctttgtcctctgagcagaagggttggcaaagagggaaggggacaggccagttctgcacctggcctttctccagaatgaaggcctccacccaccgtccgtccccacagaaagaaaagtaaactgttttcgcggctgcgcagaaagaagaacatggtaggtgcagtgagtgctgcggaggggcgcagaggcccgcgccctggctggccctgtgcatgctgccttgcgccctgctcccaggtgctcactaacccgtaatctggctctgtgtgcatgtgctgcccggcagggctgtcgtgtgcgtgttgggtgggaaggcggaggcggcgcggggcgggctggcctctgagcatctggctgcatttagcacg

SEQ ID NO: 345 - DNA, 505 bp, synthetic construct
  misc_feature 1..505: note = Synthetic
  source 1..505: mol_type = other DNA
gagcctcctgcccctcaccaggccctgttagcatcacctcgggcacctggccacagcaggggccagtcagggcaccccgggatagcacgcccaggccctgtgcaaggcctctggcacttaggagaggcttttgcccctttgtcctctgagcagaagggttggcaaagagggaaggggacaggccagttctgcacctggcctttctccagaatgaaggcctccacccaccgtccgtccccacagaaagaaaagtaaactgttttcgcggctgcgcagaaagaagaacatggtaggtgcagtgagtgctgcggaggggcgcagaggcccgcgccctggctggccctgtgcatgctgccttgcgccctgctcccaggtgctcactaacccgtaatctgctgctctgtgtgcagtgctgcccggcagggctgtcgtgtgcgtgttgggtgggaaggcggaggcggcgcggggcgggctggcctctgagcatctggctgcatttagcacg

SEQ ID NO: 346 - DNA, 506 bp, synthetic construct
  misc_feature 1..506: note = Synthetic
  source 1..506: mol_type = other DNA
gagcctcctgcccctcaccaggccctgttagcatcacctcgggcacctggccacagcaggggccagtcagggcaccccgggatagcacgcccaggccctgtgcaaggcctctggcacttaggagaggcttttgcccctttgtcctctgagcagaagggttggcaaagagggaaggggacaggccagttctgcacctggcctttctccagaatgaaggcctccacccaccgtccgtccccacagaaagaaaagtaaactgttttcgcggctgcgcagaaagaagaacatggtaggtgcagtgagtgctgcggaggggcgcagaggcccgcgccctggctggccctgtgcatgctgccttgcgccctgctcccaggtgctcactaacccgtaatctgctgctctgtgtgcatgtgctgcccggcagggctgtcgtgtgcgtgttgggtgggaaggcggaggcggcgcggggcgggctggcctctgagcatctggctgcatttagcacg

SEQ ID NO: 347 - DNA, 501 bp, synthetic construct
  misc_feature 1..501: note = Synthetic
  source 1..501: mol_type = other DNA
gagcctcctgcccctcaccaggccctgttagcatcacctcgggcacctggccacagcaggggccagtcagggcaccccgggatagcacgcccaggccctgtgcaaggcctctggcacttaggagaggcttttgcccctttgtcctctgagcagaagggttggcaaagagggaaggggacaggccagttctgcacctggcctttctccagaatgaaggcctccacccaccgtccgtccccacagaaagaaaagtaaactgttttcgcggctgcgcagaaagaagaacatggtatgtgcagtgagtgctgcggaggggcgcagaggcccgcgccctggctggccctgtgcatgcgccttgcgccctgctcccaggtgccactaacccgtaatctggctctgtgtgcagtgctgcccggcagggctgtcgtgtgcgtgttgggtgggaaggcggaggcggcgcggggcgggctggcctctgagcatctggctgcatttagcacg

SEQ ID NO: 348 - DNA, 502 bp, synthetic construct
  misc_feature 1..502: note = Synthetic
  source 1..502: mol_type = other DNA
gagcctcctgcccctcaccaggccctgttagcatcacctcgggcacctggccacagcaggggccagtcagggcaccccgggatagcacgcccaggccctgtgcaaggcctctggcacttaggagaggcttttgcccctttgtcctctgagcagaagggttggcaaagagggaaggggacaggccagttctgcacctggcctttctccagaatgaaggcctccacccaccgtccgtccccacagaaagaaaagtaaactgttttcgcggctgcgcagaaagaagaacatggtatgtgcagtgagtgctgcggaggggcgcagaggcccgcgccctggctggccctgtgcatgcgccttgcgccctgctcccaggtgccactaacccgtaatctggctctgtgtgcatgtgctgcccggcagggctgtcgtgtgcgtgttgggtgggaaggcggaggcggcgcggggcgggctggcctctgagcatctggctgcatttagcacg

SEQ ID NO: 349 - DNA, 503 bp, synthetic construct
  misc_feature 1..503: note = Synthetic
  source 1..503: mol_type = other DNA
gagcctcctgcccctcaccaggccctgttagcatcacctcgggcacctggccacagcaggggccagtcagggcaccccgggatagcacgcccaggccctgtgcaaggcctctggcacttaggagaggcttttgcccctttgtcctctgagcagaagggttggcaaagagggaaggggacaggccagttctgcacctggcctttctccagaatgaaggcctccacccaccgtccgtccccacagaaagaaaagtaaactgttttcgcggctgcgcagaaagaagaacatggtatgtgcagtgagtgctgcggaggggcgcagaggcccgcgccctggctggccctgtgcatgcgccttgcgccctgctcccaggtgccactaacccgtaatctgctgctctgtgtgcagtgctgcccggcagggctgtcgtgtgcgtgttgggtgggaaggcggaggcggcgcggggcgggctggcctctgagcatctggctgcatttagcacg

SEQ ID NO: 350 - DNA, 504 bp, synthetic construct
  misc_feature 1..504: note = Synthetic
  source 1..504: mol_type = other DNA
gagcctcctgcccctcaccaggccctgttagcatcacctcgggcacctggccacagcaggggccagtcagggcaccccgggatagcacgcccaggccctgtgcaaggcctctggcacttaggagaggcttttgcccctttgtcctctgagcagaagggttggcaaagagggaaggggacaggccagttctgcacctggcctttctccagaatgaaggcctccacccaccgtccgtccccacagaaagaaaagtaaactgttttcgcggctgcgcagaaagaagaacatggtatgtgcagtgagtgctgcggaggggcgcagaggcccgcgccctggctggccctgtgcatgcgccttgcgccctgctcccaggtgccactaacccgtaatctgctgctctgtgtgcatgtgctgcccggcagggctgtcgtgtgcgtgttgggtgggaaggcggaggcggcgcggggcgggctggcctctgagcatctggctgcatttagcacg

SEQ ID NO: 351 - DNA, 502 bp, synthetic construct
  misc_feature 1..502: note = Synthetic
  source 1..502: mol_type = other DNA
gagcctcctgcccctcaccaggccctgttagcatcacctcgggcacctggccacagcaggggccagtcagggcaccccgggatagcacgcccaggccctgtgcaaggcctctggcacttaggagaggcttttgcccctttgtcctctgagcagaagggttggcaaagagggaaggggacaggccagttctgcacctggcctttctccagaatgaaggcctccacccaccgtccgtccccacagaaagaaaagtaaactgttttcgcggctgcgcagaaagaagaacatggtatgtgcagtgagtgctgcggaggggcgcagaggcccgcgccctggctggccctgtgcatgcgccttgcgccctgctcccaggtgctcactaacccgtaatctggctctgtgtgcagtgctgcccggcagggctgtcgtgtgcgtgttgggtgggaaggcggaggcggcgcggggcgggctggcctctgagcatctggctgcatttagcacg

SEQ ID NO: 352 - DNA, 503 bp, synthetic construct
  misc_feature 1..503: note = Synthetic
  source 1..503: mol_type = other DNA
gagcctcctgcccctcaccaggccctgttagcatcacctcgggcacctggccacagcaggggccagtcagggcaccccgggatagcacgcccaggccctgtgcaaggcctctggcacttaggagaggcttttgcccctttgtcctctgagcagaagggttggcaaagagggaaggggacaggccagttctgcacctggcctttctccagaatgaaggcctccacccaccgtccgtccccacagaaagaaaagtaaactgttttcgcggctgcgcagaaagaagaacatggtatgtgcagtgagtgctgcggaggggcgcagaggcccgcgccctggctggccctgtgcatgcgccttgcgccctgctcccaggtgctcactaacccgtaatctggctctgtgtgcatgtgctgcccggcagggctgtcgtgtgcgtgttgggtgggaaggcggaggcggcgcggggcgggctggcctctgagcatctggctgcatttagcacg

SEQ ID NO: 353 - DNA, 504 bp, synthetic construct
  misc_feature 1..504: note = Synthetic
  source 1..504: mol_type = other DNA
gagcctcctgcccctcaccaggccctgttagcatcacctcgggcacctggccacagcaggggccagtcagggcaccccgggatagcacgcccaggccctgtgcaaggcctctggcacttaggagaggcttttgcccctttgtcctctgagcagaagggttggcaaagagggaaggggacaggccagttctgcacctggcctttctccagaatgaaggcctccacccaccgtccgtccccacagaaagaaaagtaaactgttttcgcggctgcgcagaaagaagaacatggtatgtgcagtgagtgctgcggaggggcgcagaggcccgcgccctggctggccctgtgcatgcgccttgcgccctgctcccaggtgctcactaacccgtaatctgctgctctgtgtgcagtgctgcccggcagggctgtcgtgtgcgtgttgggtgggaaggcggaggcggcgcggggcgggctggcctctgagcatctggctgcatttagcacg

SEQ ID NO: 354 - DNA, 505 bp, synthetic construct
  misc_feature 1..505: note = Synthetic
  source 1..505: mol_type = other DNA
gagcctcctgcccctcaccaggccctgttagcatcacctcgggcacctggccacagcaggggccagtcagggcaccccgggatagcacgcccaggccctgtgcaaggcctctggcacttaggagaggcttttgcccctttgtcctctgagcagaagggttggcaaagagggaaggggacaggccagttctgcacctggcctttctccagaatgaaggcctccacccaccgtccgtccccacagaaagaaaagtaaactgttttcgcggctgcgcagaaagaagaacatggtatgtgcagtgagtgctgcggaggggcgcagaggcccgcgccctggctggccctgtgcatgcgccttgcgccctgctcccaggtgctcactaacccgtaatctgctgctctgtgtgcatgtgctgcccggcagggctgtcgtgtgcgtgttgggtgggaaggcggaggcggcgcggggcgggctggcctctgagcatctggctgcatttagcacg

SEQ ID NO: 355 - DNA, 502 bp, synthetic construct
  misc_feature 1..502: note = Synthetic
  source 1..502: mol_type = other DNA
gagcctcctgcccctcaccaggccctgttagcatcacctcgggcacctggccacagcaggggccagtcagggcaccccgggatagcacgcccaggccctgtgcaaggcctctggcacttaggagaggcttttgcccctttgtcctctgagcagaagggttggcaaagagggaaggggacaggccagttctgcacctggcctttctccagaatgaaggcctccacccaccgtccgtccccacagaaagaaaagtaaactgttttcgcggctgcgcagaaagaagaacatggtatgtgcagtgagtgctgcggaggggcgcagaggcccgcgccctggctggccctgtgcatgctgccttgcgccctgctcccaggtgccactaacccgtaatctggctctgtgtgcagtgctgcccggcagggctgtcgtgtgcgtgttgggtgggaaggcggaggcggcgcggggcgggctggcctctgagcatctggctgcatttagcacg

SEQ ID NO: 356 - DNA, 503 bp, synthetic construct
  misc_feature 1..503: note = Synthetic
  source 1..503: mol_type = other DNA
gagcctcctgcccctcaccaggccctgttagcatcacctcgggcacctggccacagcaggggccagtcagggcaccccgggatagcacgcccaggccctgtgcaaggcctctggcacttaggagaggcttttgcccctttgtcctctgagcagaagggttggcaaagagggaaggggacaggccagttctgcacctggcctttctccagaatgaaggcctccacccaccgtccgtccccacagaaagaaaagtaaactgttttcgcggctgcgcagaaagaagaacatggtatgtgcagtgagtgctgcggaggggcgcagaggcccgcgccctggctggccctgtgcatgctgccttgcgccctgctcccaggtgccactaacccgtaatctggctctgtgtgcatgtgctgcccggcagggctgtcgtgtgcgtgttgggtgggaaggcggaggcggcgcggggcgggctggcctctgagcatctggctgcatttagcacg

SEQ ID NO: 357 - DNA, 504 bp, synthetic construct
  misc_feature 1..504: note = Synthetic
  source 1..504: mol_type = other DNA
gagcctcctgcccctcaccaggccctgttagcatcacctcgggcacctggccacagcaggggccagtcagggcaccccgggatagcacgcccaggccctgtgcaaggcctctggcacttaggagaggcttttgcccctttgtcctctgagcagaagggttggcaaagagggaaggggacaggccagttctgcacctggcctttctccagaatgaaggcctccacccaccgtccgtccccacagaaagaaaagtaaactgttttcgcggctgcgcagaaagaagaacatggtatgtgcagtgagtgctgcggaggggcgcagaggcccgcgccctggctggccctgtgcatgctgccttgcgccctgctcccaggtgccactaacccgtaatctgctgctctgtgtgcagtgctgcccggcagggctgtcgtgtgcgtgttgggtgggaaggcggaggcggcgcggggcgggctggcctctgagcatctggctgcatttagcacg

SEQ ID NO: 358 - DNA, 505 bp, synthetic construct
  misc_feature 1..505: note = Synthetic
  source 1..505: mol_type = other DNA
gagcctcctgcccctcaccaggccctgttagcatcacctcgggcacctggccacagcaggggccagtcagggcaccccgggatagcacgcccaggccctgtgcaaggcctctggcacttaggagaggcttttgcccctttgtcctctgagcagaagggttggcaaagagggaaggggacaggccagttctgcacctggcctttctccagaatgaaggcctccacccaccgtccgtccccacagaaagaaaagtaaactgttttcgcggctgcgcagaaagaagaacatggtatgtgcagtgagtgctgcggaggggcgcagaggcccgcgccctggctggccctgtgcatgctgccttgcgccctgctcccaggtgccactaacccgtaatctgctgctctgtgtgcatgtgctgcccggcagggctgtcgtgtgcgtgttgggtgggaaggcggaggcggcgcggggcgggctggcctctgagcatctggctgcatttagcacg

SEQ ID NO: 359 - DNA, 503 bp, synthetic construct
  misc_feature 1..503: note = Synthetic
  source 1..503: mol_type = other DNA
gagcctcctgcccctcaccaggccctgttagcatcacctcgggcacctggccacagcaggggccagtcagggcaccccgggatagcacgcccaggccctgtgcaaggcctctggcacttaggagaggcttttgcccctttgtcctctgagcagaagggttggcaaagagggaaggggacaggccagttctgcacctggcctttctccagaatgaaggcctccacccaccgtccgtccccacagaaagaaaagtaaactgttttcgcggctgcgcagaaagaagaacatggtatgtgcagtgagtgctgcggaggggcgcagaggcccgcgccctggctggccctgtgcatgctgccttgcgccctgctcccaggtgctcactaacccgtaatctggctctgtgtgcagtgctgcccggcagggctgtcgtgtgcgtgttgggtgggaaggcggaggcggcgcggggcgggctggcctctgagcatctggctgcatttagcacg

SEQ ID NO: 360 - DNA, 504 bp, synthetic construct
  misc_feature 1..504: note = Synthetic
  source 1..504: mol_type = other DNA
gagcctcctgcccctcaccaggccctgttagcatcacctcgggcacctggccacagcaggggccagtcagggcaccccgggatagcacgcccaggccctgtgcaaggcctctggcacttaggagaggcttttgcccctttgtcctctgagcagaagggttggcaaagagggaaggggacaggccagttctgcacctggcctttctccagaatgaaggcctccacccaccgtccgtccccacagaaagaaaagtaaactgttttcgcggctgcgcagaaagaagaacatggtatgtgcagtgagtgctgcggaggggcgcagaggcccgcgccctggctggccctgtgcatgctgccttgcgccctgctcccaggtgctcactaacccgtaatctggctctgtgtgcatgtgctgcccggcagggctgtcgtgtgcgtgttgggtgggaaggcggaggcggcgcggggcgggctggcctctgagcatctggctgcatttagcacg

SEQ ID NO: 361 - DNA, 505 bp, synthetic construct
  misc_feature 1..505: note = Synthetic
  source 1..505: mol_type = other DNA
gagcctcctgcccctcaccaggccctgttagcatcacctcgggcacctggccacagcaggggccagtcagggcaccccgggatagcacgcccaggccctgtgcaaggcctctggcacttaggagaggcttttgcccctttgtcctctgagcagaagggttggcaaagagggaaggggacaggccagttctgcacctggcctttctccagaatgaaggcctccacccaccgtccgtccccacagaaagaaaagtaaactgttttcgcggctgcgcagaaagaagaacatggtatgtgcagtgagtgctgcggaggggcgcagaggcccgcgccctggctggccctgtgcatgctgccttgcgccctgctcccaggtgctcactaacccgtaatctgctgctctgtgtgcagtgctgcccggcagggctgtcgtgtgcgtgttgggtgggaaggcggaggcggcgcggggcgggctggcctctgagcatctggctgcatttagcacg

SEQ ID NO: 362 - DNA, 506 bp, synthetic construct
  misc_feature 1..506: note = Synthetic
  source 1..506: mol_type = other DNA
gagcctcctgcccctcaccaggccctgttagcatcacctcgggcacctggccacagcaggggccagtcagggcaccccgggatagcacgcccaggccctgtgcaaggcctctggcacttaggagaggcttttgcccctttgtcctctgagcagaagggttggcaaagagggaaggggacaggccagttctgcacctggcctttctccagaatgaaggcctccacccaccgtccgtccccacagaaagaaaagtaaactgttttcgcggctgcgcagaaagaagaacatggtatgtgcagtgagtgctgcggaggggcgcagaggcccgcgccctggctggccctgtgcatgctgccttgcgccctgctcccaggtgctcactaacccgtaatctgctgctctgtgtgcatgtgctgcccggcagggctgtcgtgtgcgtgttgggtgggaaggcggaggcggcgcggggcgggctggcctctgagcatctggctgcatttagcacg

SEQ ID NO: 363 - DNA, 501 bp, synthetic construct
  misc_feature 1..501: note = Synthetic
  source 1..501: mol_type = other DNA
gagcctcctgcccctcaccaggccctgttagcatcacctcgggcacctggccacagcaggggccagtcagggcaccccgggatagcacgcccaggccctgtgcaaggcctctggcacttaggagaggcttttgcccctttgtcctctgagcagaagggttggcaaagagggaaggggacaggccagttctgcacctggcctttctccagaatgaaggcctccacccaccgtccgtccccacagaaagaaaagtaaactgttttcgcggctgcgcagaaagaagaacatggtacgagcagtgagtgctgcggaggggcgcagaggcccgcgccctggctggccctgtgcatgcgccttgcgccctgctcccaggtgccactaacccgtaatctggctctgtgtgcagtgctgcccggcagggctgtcgtgtgcgtgttgggtgggaaggcggaggcggcgcggggcgggctggcctctgagcatctggctgcatttagcacg

SEQ ID NO: 364 - DNA, 502 bp, synthetic construct
  misc_feature 1..502: note = Synthetic
  source 1..502: mol_type = other DNA
gagcctcctgcccctcaccaggccctgttagcatcacctcgggcacctggccacagcaggggccagtcagggcaccccgggatagcacgcccaggccctgtgcaaggcctctggcacttaggagaggcttttgcccctttgtcctctgagcagaagggttggcaaagagggaaggggacaggccagttctgcacctggcctttctccagaatgaaggcctccacccaccgtccgtccccacagaaagaaaagtaaactgttttcgcggctgcgcagaaagaagaacatggtacgagcagtgagtgctgcggaggggcgcagaggcccgcgccctggctggccctgtgcatgcgccttgcgccctgctcccaggtgccactaacccgtaatctggctctgtgtgcatgtgctgcccggcagggctgtcgtgtgcgtgttgggtgggaaggcggaggcggcgcggggcgggctggcctctgagcatctggctgcatttagcacg

SEQ ID NO: 365 - DNA, 503 bp, synthetic construct
  misc_feature 1..503: note = Synthetic
  source 1..503: mol_type = other DNA
gagcctcctgcccctcaccaggccctgttagcatcacctcgggcacctggccacagcaggggccagtcagggcaccccgggatagcacgcccaggccctgtgcaaggcctctggcacttaggagaggcttttgcccctttgtcctctgagcagaagggttggcaaagagggaaggggacaggccagttctgcacctggcctttctccagaatgaaggcctccacccaccgtccgtccccacagaaagaaaagtaaactgttttcgcggctgcgcagaaagaagaacatggtacgagcagtgagtgctgcggaggggcgcagaggcccgcgccctggctggccctgtgcatgcgccttgcgccctgctcccaggtgccactaacccgtaatctgctgctctgtgtgcagtgctgcccggcagggctgtcgtgtgcgtgttgggtgggaaggcggaggcggcgcggggcgggctggcctctgagcatctggctgcatttagcacg

SEQ ID NO: 366 - DNA, 504 bp, synthetic construct
  misc_feature 1..504: note = Synthetic
  source 1..504: mol_type = other DNA
gagcctcctgcccctcaccaggccctgttagcatcacctcgggcacctggccacagcaggggccagtcagggcaccccgggatagcacgcccaggccctgtgcaaggcctctggcacttaggagaggcttttgcccctttgtcctctgagcagaagggttggcaaagagggaaggggacaggccagttctgcacctggcctttctccagaatgaaggcctccacccaccgtccgtccccacagaaagaaaagtaaactgttttcgcggctgcgcagaaagaagaacatggtacgagcagtgagtgctgcggaggggcgcagaggcccgcgccctggctggccctgtgcatgcgccttgcgccctgctcccaggtgccactaacccgtaatctgctgctctgtgtgcatgtgctgcccggcagggctgtcgtgtgcgtgttgggtgggaaggcggaggcggcgcggggcgggctggcctctgagcatctggctgcatttagcacg

SEQ ID NO: 367 - DNA, 502 bp, synthetic construct
  misc_feature 1..502: note = Synthetic
  source 1..502: mol_type = other DNA
gagcctcctgcccctcaccaggccctgttagcatcacctcgggcacctggccacagcaggggccagtcagggcaccccgggatagcacgcccaggccctgtgcaaggcctctggcacttaggagaggcttttgcccctttgtcctctgagcagaagggttggcaaagagggaaggggacaggccagttctgcacctggcctttctccagaatgaaggcctccacccaccgtccgtccccacagaaagaaaagtaaactgttttcgcggctgcgcagaaagaagaacatggtacgagcagtgagtgctgcggaggggcgcagaggcccgcgccctggctggccctgtgcatgcgccttgcgccctgctcccaggtgctcactaacccgtaatctggctctgtgtgcagtgctgcccggcagggctgtcgtgtgcgtgttgggtgggaaggcggaggcggcgcggggcgggctggcctctgagcatctggctgcatttagcacg

SEQ ID NO: 368 - DNA, 503 bp, synthetic construct
  misc_feature 1..503: note = Synthetic
  source 1..503: mol_type = other DNA
gagcctcctgcccctcaccaggccctgttagcatcacctcgggcacctggccacagcaggggccagtcagggcaccccgggatagcacgcccaggccctgtgcaaggcctctggcacttaggagaggcttttgcccctttgtcctctgagcagaagggttggcaaagagggaaggggacaggccagttctgcacctggcctttctccagaatgaaggcctccacccaccgtccgtccccacagaaagaaaagtaaactgttttcgcggctgcgcagaaagaagaacatggtacgagcagtgagtgctgcggaggggcgcagaggcccgcgccctggctggccctgtgcatgcgccttgcgccctgctcccaggtgctcactaacccgtaatctggctctgtgtgcatgtgctgcccggcagggctgtcgtgtgcgtgttgggtgggaaggcggaggcggcgcggggcgggctggcctctgagcatctggctgcatttagcacg

SEQ ID NO: 369 - DNA, 504 bp, synthetic construct
  misc_feature 1..504: note = Synthetic
  source 1..504: mol_type = other DNA
gagcctcctgcccctcaccaggccctgttagcatcacctcgggcacctggccacagcaggggccagtcagggcaccccgggatagcacgcccaggccctgtgcaaggcctctggcacttaggagaggcttttgcccctttgtcctctgagcagaagggttggcaaagagggaaggggacaggccagttctgcacctggcctttctccagaatgaaggcctccacccaccgtccgtccccacagaaagaaaagtaaactgttttcgcggctgcgcagaaagaagaacatggtacgagcagtgagtgctgcggaggggcgcagaggcccgcgccctggctggccctgtgcatgcgccttgcgccctgctcccaggtgctcactaacccgtaatctgctgctctgtgtgcagtgctgcccggcagggctgtcgtgtgcgtgttgggtgggaaggcggaggcggcgcggggcgggctggcctctgagcatctggctgcatttagcacg

SEQ ID NO: 370 - DNA, 505 bp, synthetic construct
  misc_feature 1..505: note = Synthetic
  source 1..505: mol_type = other DNA
gagcctcctgcccctcaccaggccctgttagcatcacctcgggcacctggccacagcaggggccagtcagggcaccccgggatagcacgcccaggccctgtgcaaggcctctggcacttaggagaggcttttgcccctttgtcctctgagcagaagggttggcaaagagggaaggggacaggccagttctgcacctggcctttctccagaatgaaggcctccacccaccgtccgtccccacagaaagaaaagtaaactgttttcgcggctgcgcagaaagaagaacatggtacgagcagtgagtgctgcggaggggcgcagaggcccgcgccctggctggccctgtgcatgcgccttgcgccctgctcccaggtgctcactaacccgtaatctgctgctctgtgtgcatgtgctgcccggcagggctgtcgtgtgcgtgttgggtgggaaggcggaggcggcgcggggcgggctggcctctgagcatctggctgcatttagcacg

SEQ ID NO: 371 - DNA, 502 bp, synthetic construct
  misc_feature 1..502: note = Synthetic
  source 1..502: mol_type = other DNA
gagcctcctgcccctcaccaggccctgttagcatcacctcgggcacctggccacagcaggggccagtcagggcaccccgggatagcacgcccaggccctgtgcaaggcctctggcacttaggagaggcttttgcccctttgtcctctgagcagaagggttggcaaagagggaaggggacaggccagttctgcacctggcctttctccagaatgaaggcctccacccaccgtccgtccccacagaaagaaaagtaaactgttttcgcggctgcgcagaaagaagaacatggtacgagcagtgagtgctgcggaggggcgcagaggcccgcgccctggctggccctgtgcatgctgccttgcgccctgctcccaggtgccactaacccgtaatctggctctgtgtgcagtgctgcccggcagggctgtcgtgtgcgtgttgggtgggaaggcggaggcggcgcggggcgggctggcctctgagcatctggctgcatttagcacg

SEQ ID NO: 372 - DNA, 503 bp, synthetic construct
  misc_feature 1..503: note = Synthetic
  source 1..503: mol_type = other DNA
gagcctcctgcccctcaccaggccctgttagcatcacctcgggcacctggccacagcaggggccagtcagggcaccccgggatagcacgcccaggccctgtgcaaggcctctggcacttaggagaggcttttgcccctttgtcctctgagcagaagggttggcaaagagggaaggggacaggccagttctgcacctggcctttctccagaatgaaggcctccacccaccgtccgtccccacagaaagaaaagtaaactgttttcgcggctgcgcagaaagaagaacatggtacgagcagtgagtgctgcggaggggcgcagaggcccgcgccctggctggccctgtgcatgctgccttgcgccctgctcccaggtgccactaacccgtaatctggctctgtgtgcatgtgctgcccggcagggctgtcgtgtgcgtgttgggtgggaaggcggaggcggcgcggggcgggctggcctctgagcatctggctgcatttagcacg

SEQ ID NO: 373 - DNA, 504 bp, synthetic construct
  misc_feature 1..504: note = Synthetic
  source 1..504: mol_type = other DNA
gagcctcctgcccctcaccaggccctgttagcatcacctcgggcacctggccacagcaggggccagtcagggcaccccgggatagcacgcccaggccctgtgcaaggcctctggcacttaggagaggcttttgcccctttgtcctctgagcagaagggttggcaaagagggaaggggacaggccagttctgcacctggcctttctccagaatgaaggcctccacccaccgtccgtccccacagaaagaaaagtaaactgttttcgcggctgcgcagaaagaagaacatggtacgagcagtgagtgctgcggaggggcgcagaggcccgcgccctggctggccctgtgcatgctgccttgcgccctgctcccaggtgccactaacccgtaatctgctgctctgtgtgcagtgctgcccggcagggctgtcgtgtgcgtgttgggtgggaaggcggaggcggcgcggggcgggctggcctctgagcatctggctgcatttagcacg

SEQ ID NO: 374 - DNA, 505 bp, synthetic construct
  misc_feature 1..505: note = Synthetic
  source 1..505: mol_type = other DNA
gagcctcctgcccctcaccaggccctgttagcatcacctcgggcacctggccacagcaggggccagtcagggcaccccgggatagcacgcccaggccctgtgcaaggcctctggcacttaggagaggcttttgcccctttgtcctctgagcagaagggttggcaaagagggaaggggacaggccagttctgcacctggcctttctccagaatgaaggcctccacccaccgtccgtccccacagaaagaaaagtaaactgttttcgcggctgcgcagaaagaagaacatggtacgagcagtgagtgctgcggaggggcgcagaggcccgcgccctggctggccctgtgcatgctgccttgcgccctgctcccaggtgccactaacccgtaatctgctgctctgtgtgcatgtgctgcccggcagggctgtcgtgtgcgtgttgggtgggaaggcggaggcggcgcggggcgggctggcctctgagcatctggctgcatttagcacg

SEQ ID NO: 375 - DNA, 503 bp, synthetic construct
  misc_feature 1..503: note = Synthetic
  source 1..503: mol_type = other DNA
gagcctcctgcccctcaccaggccctgttagcatcacctcgggcacctggccacagcaggggccagtcagggcaccccgggatagcacgcccaggccctgtgcaaggcctctggcacttaggagaggcttttgcccctttgtcctctgagcagaagggttggcaaagagggaaggggacaggccagttctgcacctggcctttctccagaatgaaggcctccacccaccgtccgtccccacagaaagaaaagtaaactgttttcgcggctgcgcagaaagaagaacatggtacgagcagtgagtgctgcggaggggcgcagaggcccgcgccctggctggccctgtgcatgctgccttgcgccctgctcccaggtgctcactaacccgtaatctggctctgtgtgcagtgctgcccggcagggctgtcgtgtgcgtgttgggtgggaaggcggaggcggcgcggggcgggctggcctctgagcatctggctgcatttagcacg

SEQ ID NO: 376 - DNA, 504 bp, synthetic construct
  misc_feature 1..504: note = Synthetic
  source 1..504: mol_type = other DNA
gagcctcctgcccctcaccaggccctgttagcatcacctcgggcacctggccacagcaggggccagtcagggcaccccgggatagcacgcccaggccctgtgcaaggcctctggcacttaggagaggcttttgcccctttgtcctctgagcagaagggttggcaaagagggaaggggacaggccagttctgcacctggcctttctccagaatgaaggcctccacccaccgtccgtccccacagaaagaaaagtaaactgttttcgcggctgcgcagaaagaagaacatggtacgagcagtgagtgctgcggaggggcgcagaggcccgcgccctggctggccctgtgcatgctgccttgcgccctgctcccaggtgctcactaacccgtaatctggctctgtgtgcatgtgctgcccggcagggctgtcgtgtgcgtgttgggtgggaaggcggaggcggcgcggggcgggctggcctctgagcatctggctgcatttagcacg

SEQ ID NO: 377 - DNA, 505 bp, synthetic construct
  misc_feature 1..505: note = Synthetic
  source 1..505: mol_type = other DNA
gagcctcctgcccctcaccaggccctgttagcatcacctcgggcacctggccacagcaggggccagtcagggcaccccgggatagcacgcccaggccctgtgcaaggcctctggcacttaggagaggcttttgcccctttgtcctctgagcagaagggttggcaaagagggaaggggacaggccagttctgcacctggcctttctccagaatgaaggcctccacccaccgtccgtccccacagaaagaaaagtaaactgttttcgcggctgcgcagaaagaagaacatggtacgagcagtgagtgctgcggaggggcgcagaggcccgcgccctggctggccctgtgcatgctgccttgcgccctgctcccaggtgctcactaacccgtaatctgctgctctgtgtgcagtgctgcccggcagggctgtcgtgtgcgtgttgggtgggaaggcggaggcggcgcggggcgggctggcctctgagcatctggctgcatttagcacg

SEQ ID NO: 378 - DNA, 506 bp, synthetic construct
  misc_feature 1..506: note = Synthetic
  source 1..506: mol_type = other DNA
gagcctcctgcccctcaccaggccctgttagcatcacctcgggcacctggccacagcaggggccagtcagggcaccccgggatagcacgcccaggccctgtgcaaggcctctggcacttaggagaggcttttgcccctttgtcctctgagcagaagggttggcaaagagggaaggggacaggccagttctgcacctggcctttctccagaatgaaggcctccacccaccgtccgtccccacagaaagaaaagtaaactgttttcgcggctgcgcagaaagaagaacatggtacgagcagtgagtgctgcggaggggcgcagaggcccgcgccctggctggccctgtgcatgctgccttgcgccctgctcccaggtgctcactaacccgtaatctgctgctctgtgtgcatgtgctgcccggcagggctgtcgtgtgcgtgttgggtgggaaggcggaggcggcgcggggcgggctggcctctgagcatctggctgcatttagcacg

SEQ ID NO: 379 - DNA, 501 bp, synthetic construct
  misc_feature 1..501: note = Synthetic
  source 1..501: mol_type = other DNA
gagcctcctgcccctcaccaggccctgttagcatcacctcgggcacctggccacagcaggggccagtcagggcaccccgggatagcacgcccaggccctgtgcaaggcctctggcacttaggagaggcttttgcccctttgtcctctgagcagaagggttggcaaagagggaaggggacaggccagttctgcacctggcctttctccagaatgaaggcctccacccaccgtccgtccccacagaaagaaaagtaaactgttttcgcggctgcgcagaaagaagaacatggttcgtgcagtgagtgctgcggaggggcgcagaggcccgcgccctggctggccctgtgcatgcgccttgcgccctgctcccaggtgccactaacccgtaatctggctctgtgtgcagtgctgcccggcagggctgtcgtgtgcgtgttgggtgggaaggcggaggcggcgcggggcgggctggcctctgagcatctggctgcatttagcacg

SEQ ID NO: 380 - DNA, 502 bp, synthetic construct
  misc_feature 1..502: note = Synthetic
  source 1..502: mol_type = other DNA
gagcctcctgcccctcaccaggccctgttagcatcacctcgggcacctggccacagcaggggccagtcagggcaccccgggatagcacgcccaggccctgtgcaaggcctctggcacttaggagaggcttttgcccctttgtcctctgagcagaagggttggcaaagagggaaggggacaggccagttctgcacctggcctttctccagaatgaaggcctccacccaccgtccgtccccacagaaagaaaagtaaactgttttcgcggctgcgcagaaagaagaacatggttcgtgcagtgagtgctgcggaggggcgcagaggcccgcgccctggctggccctgtgcatgcgccttgcgccctgctcccaggtgccactaacccgtaatctggctctgtgtgcatgtgctgcccggcagggctgtcgtgtgcgtgttgggtgggaaggcggaggcggcgcggggcgggctggcctctgagcatctggctgcatttagcacg

SEQ ID NO: 381 - DNA, 503 bp, synthetic construct
  misc_feature 1..503: note = Synthetic
  source 1..503: mol_type = other DNA
gagcctcctgcccctcaccaggccctgttagcatcacctcgggcacctggccacagcaggggccagtcagggcaccccgggatagcacgcccaggccctgtgcaaggcctctggcacttaggagaggcttttgcccctttgtcctctgagcagaagggttggcaaagagggaaggggacaggccagttctgcacctggcctttctccagaatgaaggcctccacccaccgtccgtccccacagaaagaaaagtaaactgttttcgcggctgcgcagaaagaagaacatggttcgtgcagtgagtgctgcggaggggcgcagaggcccgcgccctggctggccctgtgcatgcgccttgcgccctgctcccaggtgccactaacccgtaatctgctgctctgtgtgcagtgctgcccggcagggctgtcgtgtgcgtgttgggtgggaaggcggaggcggcgcggggcgggctggcctctgagcatctggctgcatttagcacg

SEQ ID NO: 382 - DNA, 504 bp, synthetic construct
  misc_feature 1..504: note = Synthetic
  source 1..504: mol_type = other DNA
gagcctcctgcccctcaccaggccctgttagcatcacctcgggcacctggccacagcaggggccagtcagggcaccccgggatagcacgcccaggccctgtgcaaggcctctggcacttaggagaggcttttgcccctttgtcctctgagcagaagggttggcaaagagggaaggggacaggccagttctgcacctggcctttctccagaatgaaggcctccacccaccgtccgtccccacagaaagaaaagtaaactgttttcgcggctgcgcagaaagaagaacatggttcgtgcagtgagtgctgcggaggggcgcagaggcccgcgccctggctggccctgtgcatgcgccttgcgccctgctcccaggtgccactaacccgtaatctgctgctctgtgtgcatgtgctgcccggcagggctgtcgtgtgcgtgttgggtgggaaggcggaggcggcgcggggcgggctggcctctgagcatctggctgcatttagcacg

SEQ ID NO: 383 - DNA, 502 bp, synthetic construct
  misc_feature 1..502: note = Synthetic
  source 1..502: mol_type = other DNA
gagcctcctgcccctcaccaggccctgttagcatcacctcgggcacctggccacagcaggggccagtcagggcaccccgggatagcacgcccaggccctgtgcaaggcctctggcacttaggagaggcttttgcccctttgtcctctgagcagaagggttggcaaagagggaaggggacaggccagttctgcacctggcctttctccagaatgaaggcctccacccaccgtccgtccccacagaaagaaaagtaaactgttttcgcggctgcgcagaaagaagaacatggttcgtgcagtgagtgctgcggaggggcgcagaggcccgcgccctggctggccctgtgcatgcgccttgcgccctgctcccaggtgctcactaacccgtaatctggctctgtgtgcagtgctgcccggcagggctgtcgtgtgcgtgttgggtgggaaggcggaggcggcgcggggcgggctggcctctgagcatctggctgcatttagcacg

SEQ ID NO: 384 - DNA, 503 bp, synthetic construct
  misc_feature 1..503: note = Synthetic
  source 1..503: mol_type = other DNA
gagcctcctgcccctcaccaggccctgttagcatcacctcgggcacctggccacagcaggggccagtcagggcaccccgggatagcacgcccaggccctgtgcaaggcctctggcacttaggagaggcttttgcccctttgtcctctgagcagaagggttggcaaagagggaaggggacaggccagttctgcacctggcctttctccagaatgaaggcctccacccaccgtccgtccccacagaaagaaaagtaaactgttttcgcggctgcgcagaaagaagaacatggttcgtgcagtgagtgctgcggaggggcgcagaggcccgcgccctggctggccctgtgcatgcgccttgcgccctgctcccaggtgctcactaacccgtaatctggctctgtgtgcatgtgctgcccggcagggctgtcgtgtgcgtgttgggtgggaaggcggaggcggcgcggggcgggctggcctctgagcatctggctgcatttagcacg

SEQ ID NO: 385 - DNA, 504 bp, synthetic construct
  misc_feature 1..504: note = Synthetic
  source 1..504: mol_type = other DNA
gagcctcctgcccctcaccaggccctgttagcatcacctcgggcacctggccacagcaggggccagtcagggcaccccgggatagcacgcccaggccctgtgcaaggcctctggcacttaggagaggcttttgcccctttgtcctctgagcagaagggttggcaaagagggaaggggacaggccagttctgcacctggcctttctccagaatgaaggcctccacccaccgtccgtccccacagaaagaaaagtaaactgttttcgcggctgcgcagaaagaagaacatggttcgtgcagtgagtgctgcggaggggcgcagaggcccgcgccctggctggccctgtgcatgcgccttgcgccctgctcccaggtgctcactaacccgtaatctgctgctctgtgtgcagtgctgcccggcagggctgtcgtgtgcgtgttgggtgggaaggcggaggcggcgcggggcgggctggcctctgagcatctggctgcatttagcacg

SEQ ID NO: 386 - DNA, 505 bp, synthetic construct
  misc_feature 1..505: note = Synthetic
  source 1..505: mol_type = other DNA
gagcctcctgcccctcaccaggccctgttagcatcacctcgggcacctggccacagcaggggccagtcagggcaccccgggatagcacgcccaggccctgtgcaaggcctctggcacttaggagaggcttttgcccctttgtcctctgagcagaagggttggcaaagagggaaggggacaggccagttctgcacctggcctttctccagaatgaaggcctccacccaccgtccgtccccacagaaagaaaagtaaactgttttcgcggctgcgcagaaagaagaacatggttcgtgcagtgagtgctgcggaggggcgcagaggcccgcgccctggctggccctgtgcatgcgccttgcgccctgctcccaggtgctcactaacccgtaatctgctgctctgtgtgcatgtgctgcccggcagggctgtcgtgtgcgtgttgggtgggaaggcggaggcggcgcggggcgggctggcctctgagcatctggctgcatttagcacg

SEQ ID NO: 387 - DNA, 502 bp, synthetic construct
  misc_feature 1..502: note = Synthetic
  source 1..502: mol_type = other DNA
gagcctcctgcccctcaccaggccctgttagcatcacctcgggcacctggccacagcaggggccagtcagggcaccccgggatagcacgcccaggccctgtgcaaggcctctggcacttaggagaggcttttgcccctttgtcctctgagcagaagggttggcaaagagggaaggggacaggccagttctgcacctggcctttctccagaatgaaggcctccacccaccgtccgtccccacagaaagaaaagtaaactgttttcgcggctgcgcagaaagaagaacatggttcgtgcagtgagtgctgcggaggggcgcagaggcccgcgccctggctggccctgtgcatgctgccttgcgccctgctcccaggtgccactaacccgtaatctggctctgtgtgcagtgctgcccggcagggctgtcgtgtgcgtgttgggtgggaaggcggaggcggcgcggggcgggctggcctctgagcatctggctgcatttagcacg

SEQ ID NO: 388 - DNA, 503 bp, synthetic construct
  misc_feature 1..503: note = Synthetic
  source 1..503: mol_type = other DNA
gagcctcctgcccctcaccaggccctgttagcatcacctcgggcacctggccacagcaggggccagtcagggcaccccgggatagcacgcccaggccctgtgcaaggcctctggcacttaggagaggcttttgcccctttgtcctctgagcagaagggttggcaaagagggaaggggacaggccagttctgcacctggcctttctccagaatgaaggcctccacccaccgtccgtccccacagaaagaaaagtaaactgttttcgcggctgcgcagaaagaagaacatggttcgtgcagtgagtgctgcggaggggcgcagaggcccgcgccctggctggccctgtgcatgctgccttgcgccctgctcccaggtgccactaacccgtaatctggctctgtgtgcatgtgctgcccggcagggctgtcgtgtgcgtgttgggtgggaaggcggaggcggcgcggggcgggctggcctctgagcatctggctgcatttagcacg

SEQ ID NO: 389 - DNA, 504 bp, synthetic construct
  misc_feature 1..504: note = Synthetic
  source 1..504: mol_type = other DNA
gagcctcctgcccctcaccaggccctgttagcatcacctcgggcacctggccacagcaggggccagtcagggcaccccgggatagcacgcccaggccctgtgcaaggcctctggcacttaggagaggcttttgcccctttgtcctctgagcagaagggttggcaaagagggaaggggacaggccagttctgcacctggcctttctccagaatgaaggcctccacccaccgtccgtccccacagaaagaaaagtaaactgttttcgcggctgcgcagaaagaagaacatggttcgtgcagtgagtgctgcggaggggcgcagaggcccgcgccctggctggccctgtgcatgctgccttgcgccctgctcccaggtgccactaacccgtaatctgctgctctgtgtgcagtgctgcccggcagggctgtcgtgtgcgtgttgggtgggaaggcggaggcggcgcggggcgggctggcctctgagcatctggctgcatttagcacg

SEQ ID NO: 390 - DNA, 505 bp, synthetic construct
  misc_feature 1..505: note = Synthetic
  source 1..505: mol_type = other DNA
gagcctcctgcccctcaccaggccctgttagcatcacctcgggcacctggccacagcaggggccagtcagggcaccccgggatagcacgcccaggccctgtgcaaggcctctggcacttaggagaggcttttgcccctttgtcctctgagcagaagggttggcaaagagggaaggggacaggccagttctgcacctggcctttctccagaatgaaggcctccacccaccgtccgtccccacagaaagaaaagtaaactgttttcgcggctgcgcagaaagaagaacatggttcgtgcagtgagtgctgcggaggggcgcagaggcccgcgccctggctggccctgtgcatgctgccttgcgccctgctcccaggtgccactaacccgtaatctgctgctctgtgtgcatgtgctgcccggcagggctgtcgtgtgcgtgttgggtgggaaggcggaggcggcgcggggcgggctggcctctgagcatctggctgcatttagcacg

SEQ ID NO: 391 - DNA, 503 bp, synthetic construct
  misc_feature 1..503: note = Synthetic
  source 1..503: mol_type = other DNA
gagcctcctgcccctcaccaggccctgttagcatcacctcgggcacctggccacagcaggggccagtcagggcaccccgggatagcacgcccaggccctgtgcaaggcctctggcacttaggagaggcttttgcccctttgtcctctgagcagaagggttggcaaagagggaaggggacaggccagttctgcacctggcctttctccagaatgaaggcctccacccaccgtccgtccccacagaaagaaaagtaaactgttttcgcggctgcgcagaaagaagaacatggttcgtgcagtgagtgctgcggaggggcgcagaggcccgcgccctggctggccctgtgcatgctgccttgcgccctgctcccaggtgctcactaacccgtaatctggctctgtgtgcagtgctgcccggcagggctgtcgtgtgcgtgttgggtgggaaggcggaggcggcgcggggcgggctggcctctgagcatctggctgcatttagcacg

SEQ ID NO: 392 - DNA, 504 bp, synthetic construct
  misc_feature 1..504: note = Synthetic
  source 1..504: mol_type = other DNA
gagcctcctgcccctcaccaggccctgttagcatcacctcgggcacctggccacagcaggggccagtcagggcaccccgggatagcacgcccaggccctgtgcaaggcctctggcacttaggagaggcttttgcccctttgtcctctgagcagaagggttggcaaagagggaaggggacaggccagttctgcacctggcctttctccagaatgaaggcctccacccaccgtccgtccccacagaaagaaaagtaaactgttttcgcggctgcgcagaaagaagaacatggttcgtgcagtgagtgctgcggaggggcgcagaggcccgcgccctggctggccctgtgcatgctgccttgcgccctgctcccaggtgctcactaacccgtaatctggctctgtgtgcatgtgctgcccggcagggctgtcgtgtgcgtgttgggtgggaaggcggaggcggcgcggggcgggctggcctctgagcatctggctgcatttagcacg

SEQ ID NO: 393 - DNA, 505 bp, synthetic construct
  misc_feature 1..505: note = Synthetic
  source 1..505: mol_type = other DNA
gagcctcctgcccctcaccaggccctgttagcatcacctcgggcacctggccacagcaggggccagtcagggcaccccgggatagcacgcccaggccctgtgcaaggcctctggcacttaggagaggcttttgcccctttgtcctctgagcagaagggttggcaaagagggaaggggacaggccagttctgcacctggcctttctccagaatgaaggcctccacccaccgtccgtccccacagaaagaaaagtaaactgttttcgcggctgcgcagaaagaagaacatggttcgtgcagtgagtgctgcggaggggcgcagaggcccgcgccctggctggccctgtgcatgctgccttgcgccctgctcccaggtgctcactaacccgtaatctgctgctctgtgtgcagtgctgcccggcagggctgtcgtgtgcgtgttgggtgggaaggcggaggcggcgcggggcgggctggcctctgagcatctggctgcatttagcacg

SEQ ID NO: 394 - DNA, 506 bp, synthetic construct
  misc_feature 1..506: note = Synthetic
  source 1..506: mol_type = other DNA
gagcctcctgcccctcaccaggccctgttagcatcacctcgggcacctggccacagcaggggccagtcagggcaccccgggatagcacgcccaggccctgtgcaaggcctctggcacttaggagaggcttttgcccctttgtcctctgagcagaagggttggcaaagagggaaggggacaggccagttctgcacctggcctttctccagaatgaaggcctccacccaccgtccgtccccacagaaagaaaagtaaactgttttcgcggctgcgcagaaagaagaacatggttcgtgcagtgagtgctgcggaggggcgcagaggcccgcgccctggctggccctgtgcatgctgccttgcgccctgctcccaggtgctcactaacccgtaatctgctgctctgtgtgcatgtgctgcccggcagggctgtcgtgtgcgtgttgggtgggaaggcggaggcggcgcggggcgggctggcctctgagcatctggctgcatttagcacg

SEQ ID NO: 395 - DNA, 501 bp, synthetic construct
  misc_feature 1..501: note = Synthetic
  source 1..501: mol_type = other DNA
gagcctcctgcccctcaccaggccctgttagcatcacctcgggcacctggccacagcaggggccagtcagggcaccccgggatagcacgcccaggccctgtgcaaggcctctggcacttaggagaggcttttgcccctttgtcctctgagcagaagggttggcaaagagggaaggggacaggccagttctgcacctggcctttctccagaatgaaggcctccaccacccgtccgttcccacagaaagaaaagtaaactgttttcgcggctgcgcagaaagaagaacatggtacgtgcagtgagtgctgcggaggggcgcagaggcccgcgccctggctggccctgtgcatgcgccttgcgccctgctcccaggtgccactaacccgtaatctggctctgtgtgcagtgctgcccggcagggctgtcgtgtgcgtgttgggtgggaaggcggaggcggcgcggggcgggctggcctctgagcatctggctgcatttagcacg

SEQ ID NO: 396 - DNA, 502 bp, synthetic construct
  misc_feature 1..502: note = Synthetic
  source 1..502: mol_type = other DNA
gagcctcctgcccctcaccaggccctgttagcatcacctcgggcacctggccacagcaggggccagtcagggcaccccgggatagcacgcccaggccctgtgcaaggcctctggcacttaggagaggcttttgcccctttgtcctctgagcagaagggttggcaaagagggaaggggacaggccagttctgcacctggcctttctccagaatgaaggcctccaccacccgtccgttcccacagaaagaaaagtaaactgttttcgcggctgcgcagaaagaagaacatggtacgtgcagtgagtgctgcggaggggcgcagaggcccgcgccctggctggccctgtgcatgcgccttgcgccctgctcccaggtgccactaacccgtaatctggctctgtgtgcatgtgctgcccggcagggctgtcgtgtgcgtgttgggtgggaaggcggaggcggcgcggggcgggctggcctctgagcatctggctgcatttagcacg

SEQ ID NO: 397 - DNA, 503 bp, synthetic construct
  misc_feature 1..503: note = Synthetic
  source 1..503: mol_type = other DNA
gagcctcctgcccctcaccaggccctgttagcatcacctcgggcacctggccacagcaggggccagtcagggcaccccgggatagcacgcccaggccctgtgcaaggcctctggcacttaggagaggcttttgcccctttgtcctctgagcagaagggttggcaaagagggaaggggacaggccagttctgcacctggcctttctccagaatgaaggcctccaccacccgtccgttcccacagaaagaaaagtaaactgttttcgcggctgcgcagaaagaagaacatggtacgtgcagtgagtgctgcggaggggcgcagaggcccgcgccctggctggccctgtgcatgcgccttgcgccctgctcccaggtgccactaacccgtaatctgctgctctgtgtgcagtgctgcccggcagggctgtcgtgtgcgtgttgggtgggaaggcggaggcggcgcggggcgggctggcctctgagcatctggctgcatttagcacg

SEQ ID NO: 398 - DNA, 504 bp, synthetic construct
  misc_feature 1..504: note = Synthetic
  source 1..504: mol_type = other DNA
gagcctcctgcccctcaccaggccctgttagcatcacctcgggcacctggccacagcaggggccagtcagggcaccccgggatagcacgcccaggccctgtgcaaggcctctggcacttaggagaggcttttgcccctttgtcctctgagcagaagggttggcaaagagggaaggggacaggccagttctgcacctggcctttctccagaatgaaggcctccaccacccgtccgttcccacagaaagaaaagtaaactgttttcgcggctgcgcagaaagaagaacatggtacgtgcagtgagtgctgcggaggggcgcagaggcccgcgccctggctggccctgtgcatgcgccttgcgccctgctcccaggtgccactaacccgtaatctgctgctctgtgtgcatgtgctgcccggcagggctgtcgtgtgcgtgttgggtgggaaggcggaggcggcgcggggcgggctggcctctgagcatctggctgcatttagcacg

SEQ ID NO: 399 - DNA, 502 bp, synthetic construct
  misc_feature 1..502: note = Synthetic
  source 1..502: mol_type = other DNA
gagcctcctgcccctcaccaggccctgttagcatcacctcgggcacctggccacagcaggggccagtcagggcaccccgggatagcacgcccaggccctgtgcaaggcctctggcacttaggagaggcttttgcccctttgtcctctgagcagaagggttggcaaagagggaaggggacaggccagttctgcacctggcctttctccagaatgaaggcctccaccacccgtccgttcccacagaaagaaaagtaaactgttttcgcggctgcgcagaaagaagaacatggtacgtgcagtgagtgctgcggaggggcgcagaggcccgcgccctggctggccctgtgcatgcgccttgcgccctgctcccaggtgctcactaacccgtaatctggctctgtgtgcagtgctgcccggcagggctgtcgtgtgcgtgttgggtgggaaggcggaggcggcgcggggcgggctggcctctgagcatctggctgcatttagcacg

SEQ ID NO: 400 - DNA, 503 bp, synthetic construct
  misc_feature 1..503: note = Synthetic
  source 1..503: mol_type = other DNA
gagcctcctgcccctcaccaggccctgttagcatcacctcgggcacctggccacagcaggggccagtcagggcaccccgggatagcacgcccaggccctgtgcaaggcctctggcacttaggagaggcttttgcccctttgtcctctgagcagaagggttggcaaagagggaaggggacaggccagttctgcacctggcctttctccagaatgaaggcctccaccacccgtccgttcccacagaaagaaaagtaaactgttttcgcggctgcgcagaaagaagaacatggtacgtgcagtgagtgctgcggaggggcgcagaggcccgcgccctggctggccctgtgcatgcgccttgcgccctgctcccaggtgctcactaacccgtaatctggctctgtgtgcatgtgctgcccggcagggctgtcgtgtgcgtgttgggtgggaaggcggaggcggcgcggggcgggctggcctctgagcatctggctgcatttagcacg

SEQ ID NO: 401 - DNA, 504 bp, synthetic construct
  misc_feature 1..504: note = Synthetic
  source 1..504: mol_type = other DNA
gagcctcctgcccctcaccaggccctgttagcatcacctcgggcacctggccacagcaggggccagtcagggcaccccgggatagcacgcccaggccctgtgcaaggcctctggcacttaggagaggcttttgcccctttgtcctctgagcagaagggttggcaaagagggaaggggacaggccagttctgcacctggcctttctccagaatgaaggcctccaccacccgtccgttcccacagaaagaaaagtaaactgttttcgcggctgcgcagaaagaagaacatggtacgtgcagtgagtgctgcggaggggcgcagaggcccgcgccctggctggccctgtgcatgcgccttgcgccctgctcccaggtgctcactaacccgtaatctgctgctctgtgtgcagtgctgcccggcagggctgtcgtgtgcgtgttgggtgggaaggcggaggcggcgcggggcgggctggcctctgagcatctggctgcatttagcacg

SEQ ID NO: 402 - DNA, 505 bp, synthetic construct
  misc_feature 1..505: note = Synthetic
  source 1..505: mol_type = other DNA
gagcctcctgcccctcaccaggccctgttagcatcacctcgggcacctggccacagcaggggccagtcagggcaccccgggatagcacgcccaggccctgtgcaaggcctctggcacttaggagaggcttttgcccctttgtcctctgagcagaagggttggcaaagagggaaggggacaggccagttctgcacctggcctttctccagaatgaaggcctccaccacccgtccgttcccacagaaagaaaagtaaactgttttcgcggctgcgcagaaagaagaacatggtacgtgcagtgagtgctgcggaggggcgcagaggcccgcgccctggctggccctgtgcatgcgccttgcgccctgctcccaggtgctcactaacccgtaatctgctgctctgtgtgcatgtgctgcccggcagggctgtcgtgtgcgtgttgggtgggaaggcggaggcggcgcggggcgggctggcctctgagcatctggctgcatttagcacg

SEQ ID NO: 403 - DNA, 502 bp, synthetic construct
  misc_feature 1..502: note = Synthetic
  source 1..502: mol_type = other DNA
gagcctcctgcccctcaccaggccctgttagcatcacctcgggcacctggccacagcaggggccagtcagggcaccccgggatagcacgcccaggccctgtgcaaggcctctggcacttaggagaggcttttgcccctttgtcctctgagcagaagggttggcaaagagggaaggggacaggccagttctgcacctggcctttctccagaatgaaggcctccaccacccgtccgttcccacagaaagaaaagtaaactgttttcgcggctgcgcagaaagaagaacatggtacgtgcagtgagtgctgcggaggggcgcagaggcccgcgccctggctggccctgtgcatgctgccttgcgccctgctcccaggtgccactaacccgtaatctggctctgtgtgcagtgctgcccggcagggctgtcgtgtgcgtgttgggtgggaaggcggaggcggcgcggggcgggctggcctctgagcatctggctgcatttagcacg

SEQ ID NO: 404 - DNA, 503 bp, synthetic construct
  misc_feature 1..503: note = Synthetic
  source 1..503: mol_type = other DNA
gagcctcctgcccctcaccaggccctgttagcatcacctcgggcacctggccacagcaggggccagtcagggcaccccgggatagcacgcccaggccctgtgcaaggcctctggcacttaggagaggcttttgcccctttgtcctctgagcagaagggttggcaaagagggaaggggacaggccagttctgcacctggcctttctccagaatgaaggcctccaccacccgtccgttcccacagaaagaaaagtaaactgttttcgcggctgcgcagaaagaagaacatggtacgtgcagtgagtgctgcggaggggcgcagaggcccgcgccctggctggccctgtgcatgctgccttgcgccctgctcccaggtgccactaacccgtaatctggctctgtgtgcatgtgctgcccggcagggctgtcgtgtgcgtgttgggtgggaaggcggaggcggcgcggggcgggctggcctctgagcatctggctgcatttagcacg

SEQ ID NO: 405 - DNA, 504 bp, synthetic construct
  misc_feature 1..504: note = Synthetic
  source 1..504: mol_type = other DNA
gagcctcctgcccctcaccaggccctgttagcatcacctcgggcacctggccacagcaggggccagtcagggcaccccgggatagcacgcccaggccctgtgcaaggcctctggcacttaggagaggcttttgcccctttgtcctctgagcagaagggttggcaaagagggaaggggacaggccagttctgcacctggcctttctccagaatgaaggcctccaccacccgtccgttcccacagaaagaaaagtaaactgttttcgcggctgcgcagaaagaagaacatggtacgtgcagtgagtgctgcggaggggcgcagaggcccgcgccctggctggccctgtgcatgctgccttgcgccctgctcccaggtgccactaacccgtaatctgctgctctgtgtgcagtgctgcccggcagggctgtcgtgtgcgtgttgggtgggaaggcggaggcggcgcggggcgggctggcctctgagcatctggctgcatttagcacg

SEQ ID NO: 406 - DNA, 505 bp, synthetic construct
  misc_feature 1..505: note = Synthetic
  source 1..505: mol_type = other DNA
gagcctcctgcccctcaccaggccctgttagcatcacctcgggcacctggccacagcaggggccagtcagggcaccccgggatagcacgcccaggccctgtgcaaggcctctggcacttaggagaggcttttgcccctttgtcctctgagcagaagggttggcaaagagggaaggggacaggccagttctgcacctggcctttctccagaatgaaggcctccaccacccgtccgttcccacagaaagaaaagtaaactgttttcgcggctgcgcagaaagaagaacatggtacgtgcagtgagtgctgcggaggggcgcagaggcccgcgccctggctggccctgtgcatgctgccttgcgccctgctcccaggtgccactaacccgtaatctgctgctctgtgtgcatgtgctgcccggcagggctgtcgtgtgcgtgttgggtgggaaggcggaggcggcgcggggcgggctggcctctgagcatctggctgcatttagcacg

SEQ ID NO: 407 - DNA, 503 bp, synthetic construct
  misc_feature 1..503: note = Synthetic
  source 1..503: mol_type = other DNA
gagcctcctgcccctcaccaggccctgttagcatcacctcgggcacctggccacagcaggggccagtcagggcaccccgggatagcacgcccaggccctgtgcaaggcctctggcacttaggagaggcttttgcccctttgtcctctgagcagaagggttggcaaagagggaaggggacaggccagttctgcacctggcctttctccagaatgaaggcctccaccacccgtccgttcccacagaaagaaaagtaaactgttttcgcggctgcgcagaaagaagaacatggtacgtgcagtgagtgctgcggaggggcgcagaggcccgcgccctggctggccctgtgcatgctgccttgcgccctgctcccaggtgctcactaacccgtaatctggctctgtgtgcagtgctgcccggcagggctgtcgtgtgcgtgttgggtgggaaggcggaggcggcgcggggcgggctggcctctgagcatctggctgcatttagcacg

SEQ ID NO: 408 - DNA, 504 bp, synthetic construct
  misc_feature 1..504: note = Synthetic
  source 1..504: mol_type = other DNA
gagcctcctgcccctcaccaggccctgttagcatcacctcgggcacctggccacagcaggggccagtcagggcaccccgggatagcacgcccaggccctgtgcaaggcctctggcacttaggagaggcttttgcccctttgtcctctgagcagaagggttggcaaagagggaaggggacaggccagttctgcacctggcctttctccagaatgaaggcctccaccacccgtccgttcccacagaaagaaaagtaaactgttttcgcggctgcgcagaaagaagaacatggtacgtgcagtgagtgctgcggaggggcgcagaggcccgcgccctggctggccctgtgcatgctgccttgcgccctgctcccaggtgctcactaacccgtaatctggctctgtgtgcatgtgctgcccggcagggctgtcgtgtgcgtgttgggtgggaaggcggaggcggcgcggggcgggctggcctctgagcatctggctgcatttagcacg

SEQ ID NO: 409 - DNA, 505 bp, synthetic construct
  misc_feature 1..505: note = Synthetic
  source 1..505: mol_type = other DNA
gagcctcctgcccctcaccaggccctgttagcatcacctcgggcacctggccacagcaggggccagtcagggcaccccgggatagcacgcccaggccctgtgcaaggcctctggcacttaggagaggcttttgcccctttgtcctctgagcagaagggttggcaaagagggaaggggacaggccagttctgcacctggcctttctccagaatgaaggcctccaccacccgtccgttcccacagaaagaaaagtaaactgttttcgcggctgcgcagaaagaagaacatggtacgtgcagtgagtgctgcggaggggcgcagaggcccgcgccctggctggccctgtgcatgctgccttgcgccctgctcccaggtgctcactaacccgtaatctgctgctctgtgtgcagtgctgcccggcagggctgtcgtgtgcgtgttgggtgggaaggcggaggcggcgcggggcgggctggcctctgagcatctggctgcatttagcacg

SEQ ID NO: 410 - DNA, 506 bp, synthetic construct
  misc_feature 1..506: note = Synthetic
  source 1..506: mol_type = other DNA
gagcctcctgcccctcaccaggccctgttagcatcacctcgggcacctggccacagcaggggccagtcagggcaccccgggatagcacgcccaggccctgtgcaaggcctctggcacttaggagaggcttttgcccctttgtcctctgagcagaagggttggcaaagagggaaggggacaggccagttctgcacctggcctttctccagaatgaaggcctccaccacccgtccgttcccacagaaagaaaagtaaactgttttcgcggctgcgcagaaagaagaacatggtacgtgcagtgagtgctgcggaggggcgcagaggcccgcgccctggctggccctgtgcatgctgccttgcgccctgctcccaggtgctcactaacccgtaatctgctgctctgtgtgcatgtgctgcccggcagggctgtcgtgtgcgtgttgggtgggaaggcggaggcggcgcggggcgggctggcctctgagcatctggctgcatttagcacg

SEQ ID NO: 411 - DNA, 501 bp, synthetic construct
  misc_feature 1..501: note = Synthetic
  source 1..501: mol_type = other DNA
gagcctcctgcccctcaccaggccctgttagcatcacctcgggcacctggccacagcaggggccagtcagggcaccccgggatagcacgcccaggccctgtgcaaggcctctggcacttaggagaggcttttgcccctttgtcctctgagcagaagggttggcaaagagggaaggggacaggccagttctgcacctggcctttctccagaatgaaggcctccaccacccgtccgttcccacagaaagaaaagtaaactgttttcgcggctgcgcagaaagaagaacatggtaagtgcagtgagtgctgcggaggggcgcagaggcccgcgccctggctggccctgtgcatgcgccttgcgccctgctcccaggtgccactaacccgtaatctggctctgtgtgcagtgctgcccggcagggctgtcgtgtgcgtgttgggtgggaaggcggaggcggcgcggggcgggctggcctctgagcatctggctgcatttagcacg

SEQ ID NO: 412 - DNA, 502 bp, synthetic construct
  misc_feature 1..502: note = Synthetic
  source 1..502: mol_type = other DNA
gagcctcctgcccctcaccaggccctgttagcatcacctcgggcacctggccacagcaggggccagtcagggcaccccgggatagcacgcccaggccctgtgcaaggcctctggcacttaggagaggcttttgcccctttgtcctctgagcagaagggttggcaaagagggaaggggacaggccagttctgcacctggcctttctccagaatgaaggcctccaccacccgtccgttcccacagaaagaaaagtaaactgttttcgcggctgcgcagaaagaagaacatggtaagtgcagtgagtgctgcggaggggcgcagaggcccgcgccctggctggccctgtgcatgcgccttgcgccctgctcccaggtgccactaacccgtaatctggctctgtgtgcatgtgctgcccggcagggctgtcgtgtgcgtgttgggtgggaaggcggaggcggcgcggggcgggctggcctctgagcatctggctgcatttagcacg

SEQ ID NO: 413 - DNA, 503 bp, synthetic construct
  misc_feature 1..503: note = Synthetic
  source 1..503: mol_type = other DNA
gagcctcctgcccctcaccaggccctgttagcatcacctcgggcacctggccacagcaggggccagtcagggcaccccgggatagcacgcccaggccctgtgcaaggcctctggcacttaggagaggcttttgcccctttgtcctctgagcagaagggttggcaaagagggaaggggacaggccagttctgcacctggcctttctccagaatgaaggcctccaccacccgtccgttcccacagaaagaaaagtaaactgttttcgcggctgcgcagaaagaagaacatggtaagtgcagtgagtgctgcggaggggcgcagaggcccgcgccctggctggccctgtgcatgcgccttgcgccctgctcccaggtgccactaacccgtaatctgctgctctgtgtgcagtgctgcccggcagggctgtcgtgtgcgtgttgggtgggaaggcggaggcggcgcggggcgggctggcctctgagcatctggctgcatttagcacg

SEQ ID NO: 414 - DNA, 504 bp, synthetic construct
  misc_feature 1..504: note = Synthetic
  source 1..504: mol_type = other DNA
gagcctcctgcccctcaccaggccctgttagcatcacctcgggcacctggccacagcaggggccagtcagggcaccccgggatagcacgcccaggccctgtgcaaggcctctggcacttaggagaggcttttgcccctttgtcctctgagcagaagggttggcaaagagggaaggggacaggccagttctgcacctggcctttctccagaatgaaggcctccaccacccgtccgttcccacagaaagaaaagtaaactgttttcgcggctgcgcagaaagaagaacatggtaagtgcagtgagtgctgcggaggggcgcagaggcccgcgccctggctggccctgtgcatgcgccttgcgccctgctcccaggtgccactaacccgtaatctgctgctctgtgtgcatgtgctgcccggcagggctgtcgtgtgcgtgttgggtgggaaggcggaggcggcgcggggcgggctggcctctgagcatctggctgcatttagcacg

SEQ ID NO: 415 - DNA, 502 bp, synthetic construct
  misc_feature 1..502: note = Synthetic
  source 1..502: mol_type = other DNA
gagcctcctgcccctcaccaggccctgttagcatcacctcgggcacctggccacagcaggggccagtcagggcaccccgggatagcacgcccaggccctgtgcaaggcctctggcacttaggagaggcttttgcccctttgtcctctgagcagaagggttggcaaagagggaaggggacaggccagttctgcacctggcctttctccagaatgaaggcctccaccacccgtccgttcccacagaaagaaaagtaaactgttttcgcggctgcgcagaaagaagaacatggtaagtgcagtgagtgctgcggaggggcgcagaggcccgcgccctggctggccctgtgcatgcgccttgcgccctgctcccaggtgctcactaacccgtaatctggctctgtgtgcagtgctgcccggcagggctgtcgtgtgcgtgttgggtgggaaggcggaggcggcgcggggcgggctggcctctgagcatctggctgcatttagcacg

SEQ ID NO: 416 - DNA, 503 bp, synthetic construct
  misc_feature 1..503: note = Synthetic
  source 1..503: mol_type = other DNA
gagcctcctgcccctcaccaggccctgttagcatcacctcgggcacctggccacagcaggggccagtcagggcaccccgggatagcacgcccaggccctgtgcaaggcctctggcacttaggagaggcttttgcccctttgtcctctgagcagaagggttggcaaagagggaaggggacaggccagttctgcacctggcctttctccagaatgaaggcctccaccacccgtccgttcccacagaaagaaaagtaaactgttttcgcggctgcgcagaaagaagaacatggtaagtgcagtgagtgctgcggaggggcgcagaggcccgcgccctggctggccctgtgcatgcgccttgcgccctgctcccaggtgctcactaacccgtaatctggctctgtgtgcatgtgctgcccggcagggctgtcgtgtgcgtgttgggtgggaaggcggaggcggcgcggggcgggctggcctctgagcatctggctgcatttagcacg

SEQ ID NO: 417 - DNA, 504 bp, synthetic construct
  misc_feature 1..504: note = Synthetic
  source 1..504: mol_type = other DNA
gagcctcctgcccctcaccaggccctgttagcatcacctcgggcacctggccacagcaggggccagtcagggcaccccgggatagcacgcccaggccctgtgcaaggcctctggcacttaggagaggcttttgcccctttgtcctctgagcagaagggttggcaaagagggaaggggacaggccagttctgcacctggcctttctccagaatgaaggcctccaccacccgtccgttcccacagaaagaaaagtaaactgttttcgcggctgcgcagaaagaagaacatggtaagtgcagtgagtgctgcggaggggcgcagaggcccgcgccctggctggccctgtgcatgcgccttgcgccctgctcccaggtgctcactaacccgtaatctgctgctctgtgtgcagtgctgcccggcagggctgtcgtgtgcgtgttgggtgggaaggcggaggcggcgcggggcgggctggcctctgagcatctggctgcatttagcacg

SEQ ID NO: 418 - DNA, 505 bp, synthetic construct
  misc_feature 1..505: note = Synthetic
  source 1..505: mol_type = other DNA
gagcctcctgcccctcaccaggccctgttagcatcacctcgggcacctggccacagcaggggccagtcagggcaccccgggatagcacgcccaggccctgtgcaaggcctctggcacttaggagaggcttttgcccctttgtcctctgagcagaagggttggcaaagagggaaggggacaggccagttctgcacctggcctttctccagaatgaaggcctccaccacccgtccgttcccacagaaagaaaagtaaactgttttcgcggctgcgcagaaagaagaacatggtaagtgcagtgagtgctgcggaggggcgcagaggcccgcgccctggctggccctgtgcatgcgccttgcgccctgctcccaggtgctcactaacccgtaatctgctgctctgtgtgcatgtgctgcccggcagggctgtcgtgtgcgtgttgggtgggaaggcggaggcggcgcggggcgggctggcctctgagcatctggctgcatttagcacg

SEQ ID NO: 419 - DNA, 502 bp, synthetic construct
  misc_feature 1..502: note = Synthetic
  source 1..502: mol_type = other DNA
gagcctcctgcccctcaccaggccctgttagcatcacctcgggcacctggccacagcaggggccagtcagggcaccccgggatagcacgcccaggccctgtgcaaggcctctggcacttaggagaggcttttgcccctttgtcctctgagcagaagggttggcaaagagggaaggggacaggccagttctgcacctggcctttctccagaatgaaggcctccaccacccgtccgttcccacagaaagaaaagtaaactgttttcgcggctgcgcagaaagaagaacatggtaagtgcagtgagtgctgcggaggggcgcagaggcccgcgccctggctggccctgtgcatgctgccttgcgccctgctcccaggtgccactaacccgtaatctggctctgtgtgcagtgctgcccggcagggctgtcgtgtgcgtgttgggtgggaaggcggaggcggcgcggggcgggctggcctctgagcatctggctgcatttagcacg

SEQ ID NO: 420 - DNA, 503 bp, synthetic construct
  misc_feature 1..503: note = Synthetic
  source 1..503: mol_type = other DNA
gagcctcctgcccctcaccaggccctgttagcatcacctcgggcacctggccacagcaggggccagtcagggcaccccgggatagcacgcccaggccctgtgcaaggcctctggcacttaggagaggcttttgcccctttgtcctctgagcagaagggttggcaaagagggaaggggacaggccagttctgcacctggcctttctccagaatgaaggcctccaccacccgtccgttcccacagaaagaaaagtaaactgttttcgcggctgcgcagaaagaagaacatggtaagtgcagtgagtgctgcggaggggcgcagaggcccgcgccctggctggccctgtgcatgctgccttgcgccctgctcccaggtgccactaacccgtaatctggctctgtgtgcatgtgctgcccggcagggctgtcgtgtgcgtgttgggtgggaaggcggaggcggcgcggggcgggctggcctctgagcatctggctgcatttagcacg

SEQ ID NO: 421 - DNA, 504 bp, synthetic construct
  misc_feature 1..504: note = Synthetic
  source 1..504: mol_type = other DNA
gagcctcctgcccctcaccaggccctgttagcatcacctcgggcacctggccacagcaggggccagtcagggcaccccgggatagcacgcccaggccctgtgcaaggcctctggcacttaggagaggcttttgcccctttgtcctctgagcagaagggttggcaaagagggaaggggacaggccagttctgcacctggcctttctccagaatgaaggcctccaccacccgtccgttcccacagaaagaaaagtaaactgttttcgcggctgcgcagaaagaagaacatggtaagtgcagtgagtgctgcggaggggcgcagaggcccgcgccctggctggccctgtgcatgctgccttgcgccctgctcccaggtgccactaacccgtaatctgctgctctgtgtgcagtgctgcccggcagggctgtcgtgtgcgtgttgggtgggaaggcggaggcggcgcggggcgggctggcctctgagcatctggctgcatttagcacg

SEQ ID NO: 422 - DNA, 505 bp, synthetic construct
  misc_feature 1..505: note = Synthetic
  source 1..505: mol_type = other DNA
gagcctcctgcccctcaccaggccctgttagcatcacctcgggcacctggccacagcaggggccagtcagggcaccccgggatagcacgcccaggccctgtgcaaggcctctggcacttaggagaggcttttgcccctttgtcctctgagcagaagggttggcaaagagggaaggggacaggccagttctgcacctggcctttctccagaatgaaggcctccaccacccgtccgttcccacagaaagaaaagtaaactgttttcgcggctgcgcagaaagaagaacatggtaagtgcagtgagtgctgcggaggggcgcagaggcccgcgccctggctggccctgtgcatgctgccttgcgccctgctcccaggtgccactaacccgtaatctgctgctctgtgtgcatgtgctgcccggcagggctgtcgtgtgcgtgttgggtgggaaggcggaggcggcgcggggcgggctggcctctgagcatctggctgcatttagcacg

SEQ ID NO: 423 - DNA, 503 bp, synthetic construct
  misc_feature 1..503: note = Synthetic
  source 1..503: mol_type = other DNA
gagcctcctgcccctcaccaggccctgttagcatcacctcgggcacctggccacagcaggggccagtcagggcaccccgggatagcacgcccaggccctgtgcaaggcctctggcacttaggagaggcttttgcccctttgtcctctgagcagaagggttggcaaagagggaaggggacaggccagttctgcacctggcctttctccagaatgaaggcctccaccacccgtccgttcccacagaaagaaaagtaaactgttttcgcggctgcgcagaaagaagaacatggtaagtgcagtgagtgctgcggaggggcgcagaggcccgcgccctggctggccctgtgcatgctgccttgcgccctgctcccaggtgctcactaacccgtaatctggctctgtgtgcagtgctgcccggcagggctgtcgtgtgcgtgttgggtgggaaggcggaggcggcgcggggcgggctggcctctgagcatctggctgcatttagcacg

SEQ ID NO: 424 - DNA, 504 bp, synthetic construct
  misc_feature 1..504: note = Synthetic
  source 1..504: mol_type = other DNA
gagcctcctgcccctcaccaggccctgttagcatcacctcgggcacctggccacagcaggggccagtcagggcaccccgggatagcacgcccaggccctgtgcaaggcctctggcacttaggagaggcttttgcccctttgtcctctgagcagaagggttggcaaagagggaaggggacaggccagttctgcacctggcctttctccagaatgaaggcctccaccacccgtccgttcccacagaaagaaaagtaaactgttttcgcggctgcgcagaaagaagaacatggtaagtgcagtgagtgctgcggaggggcgcagaggcccgcgccctggctggccctgtgcatgctgccttgcgccctgctcccaggtgctcactaacccgtaatctggctctgtgtgcatgtgctgcccggcagggctgtcgtgtgcgtgttgggtgggaaggcggaggcggcgcggggcgggctggcctctgagcatctggctgcatttagcacg

SEQ ID NO: 425 - DNA, 505 bp, synthetic construct
  misc_feature 1..505: note = Synthetic
  source 1..505: mol_type = other DNA
gagcctcctgcccctcaccaggccctgttagcatcacctcgggcacctggccacagcaggggccagtcagggcaccccgggatagcacgcccaggccctgtgcaaggcctctggcacttaggagaggcttttgcccctttgtcctctgagcagaagggttggcaaagagggaaggggacaggccagttctgcacctggcctttctccagaatgaaggcctccaccacccgtccgttcccacagaaagaaaagtaaactgttttcgcggctgcgcagaaagaagaacatggtaagtgcagtgagtgctgcggaggggcgcagaggcccgcgccctggctggccctgtgcatgctgccttgcgccctgctcccaggtgctcactaacccgtaatctgctgctctgtgtgcagtgctgcccggcagggctgtcgtgtgcgtgttgggtgggaaggcggaggcggcgcggggcgggctggcctctgagcatctggctgcatttagcacg

SEQ ID NO: 426 - DNA, 506 bp, synthetic construct
  misc_feature 1..506: note = Synthetic
  source 1..506: mol_type = other DNA
gagcctcctgcccctcaccaggccctgttagcatcacctcgggcacctggccacagcaggggccagtcagggcaccccgggatagcacgcccaggccctgtgcaaggcctctggcacttaggagaggcttttgcccctttgtcctctgagcagaagggttggcaaagagggaaggggacaggccagttctgcacctggcctttctccagaatgaaggcctccaccacccgtccgttcccacagaaagaaaagtaaactgttttcgcggctgcgcagaaagaagaacatggtaagtgcagtgagtgctgcggaggggcgcagaggcccgcgccctggctggccctgtgcatgctgccttgcgccctgctcccaggtgctcactaacccgtaatctgctgctctgtgtgcatgtgctgcccggcagggctgtcgtgtgcgtgttgggtgggaaggcggaggcggcgcggggcgggctggcctctgagcatctggctgcatttagcacg

SEQ ID NO: 427 - DNA, 501 bp, synthetic construct
  misc_feature 1..501: note = Synthetic
  source 1..501: mol_type = other DNA
gagcctcctgcccctcaccaggccctgttagcatcacctcgggcacctggccacagcaggggccagtcagggcaccccgggatagcacgcccaggccctgtgcaaggcctctggcacttaggagaggcttttgcccctttgtcctctgagcagaagggttggcaaagagggaaggggacaggccagttctgcacctggcctttctccagaatgaaggcctccaccacccgtccgttcccacagaaagaaaagtaaactgttttcgcggctgcgcagaaagaagaacatggtaggtgcagtgagtgctgcggaggggcgcagaggcccgcgccctggctggccctgtgcatgcgccttgcgccctgctcccaggtgccactaacccgtaatctggctctgtgtgcagtgctgcccggcagggctgtcgtgtgcgtgttgggtgggaaggcggaggcggcgcggggcgggctggcctctgagcatctggctgcatttagcacg

SEQ ID NO: 428 - DNA, 502 bp, synthetic construct
  misc_feature 1..502: note = Synthetic
  source 1..502: mol_type = other DNA
gagcctcctgcccctcaccaggccctgttagcatcacctcgggcacctggccacagcaggggccagtcagggcaccccgggatagcacgcccaggccctgtgcaaggcctctggcacttaggagaggcttttgcccctttgtcctctgagcagaagggttggcaaagagggaaggggacaggccagttctgcacctggcctttctccagaatgaaggcctccaccacccgtccgttcccacagaaagaaaagtaaactgttttcgcggctgcgcagaaagaagaacatggtaggtgcagtgagtgctgcggaggggcgcagaggcccgcgccctggctggccctgtgcatgcgccttgcgccctgctcccaggtgccactaacccgtaatctggctctgtgtgcatgtgctgcccggcagggctgtcgtgtgcgtgttgggtgggaaggcggaggcggcgcggggcgggctggcctctgagcatctggctgcatttagcacg

SEQ ID NO: 429 - DNA, 503 bp, synthetic construct
  misc_feature 1..503: note = Synthetic
  source 1..503: mol_type = other DNA
gagcctcctgcccctcaccaggccctgttagcatcacctcgggcacctggccacagcaggggccagtcagggcaccccgggatagcacgcccaggccctgtgcaaggcctctggcacttaggagaggcttttgcccctttgtcctctgagcagaagggttggcaaagagggaaggggacaggccagttctgcacctggcctttctccagaatgaaggcctccaccacccgtccgttcccacagaaagaaaagtaaactgttttcgcggctgcgcagaaagaagaacatggtaggtgcagtgagtgctgcggaggggcgcagaggcccgcgccctggctggccctgtgcatgcgccttgcgccctgctcccaggtgccactaacccgtaatctgctgctctgtgtgcagtgctgcccggcagggctgtcgtgtgcgtgttgggtgggaaggcggaggcggcgcggggcgggctggcctctgagcatctggctgcatttagcacg

SEQ ID NO: 430 - DNA, 504 bp, synthetic construct
  misc_feature 1..504: note = Synthetic
  source 1..504: mol_type = other DNA
gagcctcctgcccctcaccaggccctgttagcatcacctcgggcacctggccacagcaggggccagtcagggcaccccgggatagcacgcccaggccctgtgcaaggcctctggcacttaggagaggcttttgcccctttgtcctctgagcagaagggttggcaaagagggaaggggacaggccagttctgcacctggcctttctccagaatgaaggcctccaccacccgtccgttcccacagaaagaaaagtaaactgttttcgcggctgcgcagaaagaagaacatggtaggtgcagtgagtgctgcggaggggcgcagaggcccgcgccctggctggccctgtgcatgcgccttgcgccctgctcccaggtgccactaacccgtaatctgctgctctgtgtgcatgtgctgcccggcagggctgtcgtgtgcgtgttgggtgggaaggcggaggcggcgcggggcgggctggcctctgagcatctggctgcatttagcacg

SEQ ID NO: 431 - DNA, 502 bp, synthetic construct
  misc_feature 1..502: note = Synthetic
  source 1..502: mol_type = other DNA
gagcctcctgcccctcaccaggccctgttagcatcacctcgggcacctggccacagcaggggccagtcagggcaccccgggatagcacgcccaggccctgtgcaaggcctctggcacttaggagaggcttttgcccctttgtcctctgagcagaagggttggcaaagagggaaggggacaggccagttctgcacctggcctttctccagaatgaaggcctccaccacccgtccgttcccacagaaagaaaagtaaactgttttcgcggctgcgcagaaagaagaacatggtaggtgcagtgagtgctgcggaggggcgcagaggcccgcgccctggctggccctgtgcatgcgccttgcgccctgctcccaggtgctcactaacccgtaatctggctctgtgtgcagtgctgcccggcagggctgtcgtgtgcgtgttgggtgggaaggcggaggcggcgcggggcgggctggcctctgagcatctggctgcatttagcacg

SEQ ID NO: 432 - DNA, 503 bp, synthetic construct
  misc_feature 1..503: note = Synthetic
  source 1..503: mol_type = other DNA
gagcctcctgcccctcaccaggccctgttagcatcacctcgggcacctggccacagcaggggccagtcagggcaccccgggatagcacgcccaggccctgtgcaaggcctctggcacttaggagaggcttttgcccctttgtcctctgagcagaagggttggcaaagagggaaggggacaggccagttctgcacctggcctttctccagaatgaaggcctccaccacccgtccgttcccacagaaagaaaagtaaactgttttcgcggctgcgcagaaagaagaacatggtaggtgcagtgagtgctgcggaggggcgcagaggcccgcgccctggctggccctgtgcatgcgccttgcgccctgctcccaggtgctcactaacccgtaatctggctctgtgtgcatgtgctgcccggcagggctgtcgtgtgcgtgttgggtgggaaggcggaggcggcgcggggcgggctggcctctgagcatctggctgcatttagcacg

SEQ ID NO: 433 - DNA, 504 bp, synthetic construct
  misc_feature 1..504: note = Synthetic
  source 1..504: mol_type = other DNA
gagcctcctgcccctcaccaggccctgttagcatcacctcgggcacctggccacagcaggggccagtcagggcaccccgggatagcacgcccaggccctgtgcaaggcctctggcacttaggagaggcttttgcccctttgtcctctgagcagaagggttggcaaagagggaaggggacaggccagttctgcacctggcctttctccagaatgaaggcctccaccacccgtccgttcccacagaaagaaaagtaaactgttttcgcggctgcgcagaaagaagaacatggtaggtgcagtgagtgctgcggaggggcgcagaggcccgcgccctggctggccctgtgcatgcgccttgcgccctgctcccaggtgctcactaacccgtaatctgctgctctgtgtgcagtgctgcccggcagggctgtcgtgtgcgtgttgggtgggaaggcggaggcggcgcggggcgggctggcctctgagcatctggctgcatttagcacg

SEQ ID NO: 434 - DNA, 505 bp, synthetic construct
  misc_feature 1..505: note = Synthetic
  source 1..505: mol_type = other DNA
gagcctcctgcccctcaccaggccctgttagcatcacctcgggcacctggccacagcaggggccagtcagggcaccccgggatagcacgcccaggccctgtgcaaggcctctggcacttaggagaggcttttgcccctttgtcctctgagcagaagggttggcaaagagggaaggggacaggccagttctgcacctggcctttctccagaatgaaggcctccaccacccgtccgttcccacagaaagaaaagtaaactgttttcgcggctgcgcagaaagaagaacatggtaggtgcagtgagtgctgcggaggggcgcagaggcccgcgccctggctggccctgtgcatgcgccttgcgccctgctcccaggtgctcactaacccgtaatctgctgctctgtgtgcatgtgctgcccggcagggctgtcgtgtgcgtgttgggtgggaaggcggaggcggcgcggggcgggctggcctctgagcatctggctgcatttagcacg

SEQ ID NO: 435 - DNA, 502 bp, synthetic construct
  misc_feature 1..502: note = Synthetic
  source 1..502: mol_type = other DNA
gagcctcctgcccctcaccaggccctgttagcatcacctcgggcacctggccacagcaggggccagtcagggcaccccgggatagcacgcccaggccctgtgcaaggcctctggcacttaggagaggcttttgcccctttgtcctctgagcagaagggttggcaaagagggaaggggacaggccagttctgcacctggcctttctccagaatgaaggcctccaccacccgtccgttcccacagaaagaaaagtaaactgttttcgcggctgcgcagaaagaagaacatggtaggtgcagtgagtgctgcggaggggcgcagaggcccgcgccctggctggccctgtgcatgctgccttgcgccctgctcccaggtgccactaacccgtaatctggctctgtgtgcagtgctgcccggcagggctgtcgtgtgcgtgttgggtgggaaggcggaggcggcgcggggcgggctggcctctgagcatctggctgcatttagcacg

SEQ ID NO: 436 - DNA, 503 bp, synthetic construct
  misc_feature 1..503: note = Synthetic
  source 1..503: mol_type = other DNA
gagcctcctgcccctcaccaggccctgttagcatcacctcgggcacctggccacagcaggggccagtcagggcaccccgggatagcacgcccaggccctgtgcaaggcctctggcacttaggagaggcttttgcccctttgtcctctgagcagaagggttggcaaagagggaaggggacaggccagttctgcacctggcctttctccagaatgaaggcctccaccacccgtccgttcccacagaaagaaaagtaaactgttttcgcggctgcgcagaaagaagaacatggtaggtgcagtgagtgctgcggaggggcgcagaggcccgcgccctggctggccctgtgcatgctgccttgcgccctgctcccaggtgccactaacccgtaatctggctctgtgtgcatgtgctgcccggcagggctgtcgtgtgcgtgttgggtgggaaggcggaggcggcgcggggcgggctggcctctgagcatctggctgcatttagcacg

SEQ ID NO: 437 - DNA, 504 bp, synthetic construct
  misc_feature 1..504: note = Synthetic
  source 1..504: mol_type = other DNA
gagcctcctgcccctcaccaggccctgttagcatcacctcgggcacctggccacagcaggggccagtcagggcaccccgggatagcacgcccaggccctgtgcaaggcctctggcacttaggagaggcttttgcccctttgtcctctgagcagaagggttggcaaagagggaaggggacaggccagttctgcacctggcctttctccagaatgaaggcctccaccacccgtccgttcccacagaaagaaaagtaaactgttttcgcggctgcgcagaaagaagaacatggtaggtgcagtgagtgctgcggaggggcgcagaggcccgcgccctggctggccctgtgcatgctgccttgcgccctgctcccaggtgccactaacccgtaatctgctgctctgtgtgcagtgctgcccggcagggctgtcgtgtgcgtgttgggtgggaaggcggaggcggcgcggggcgggctggcctctgagcatctggctgcatttagcacg

SEQ ID NO: 438 - DNA, 505 bp, synthetic construct
  misc_feature 1..505: note = Synthetic
  source 1..505: mol_type = other DNA
gagcctcctgcccctcaccaggccctgttagcatcacctcgggcacctggccacagcaggggccagtcagggcaccccgggatagcacgcccaggccctgtgcaaggcctctggcacttaggagaggcttttgcccctttgtcctctgagcagaagggttggcaaagagggaaggggacaggccagttctgcacctggcctttctccagaatgaaggcctccaccacccgtccgttcccacagaaagaaaagtaaactgttttcgcggctgcgcagaaagaagaacatggtaggtgcagtgagtgctgcggaggggcgcagaggcccgcgccctggctggccctgtgcatgctgccttgcgccctgctcccaggtgccactaacccgtaatctgctgctctgtgtgcatgtgctgcccggcagggctgtcgtgtgcgtgttgggtgggaaggcggaggcggcgcggggcgggctggcctctgagcatctggctgcatttagcacg

SEQ ID NO: 439 - DNA, 503 bp, synthetic construct
  misc_feature 1..503: note = Synthetic
  source 1..503: mol_type = other DNA
gagcctcctgcccctcaccaggccctgttagcatcacctcgggcacctggccacagcaggggccagtcagggcaccccgggatagcacgcccaggccctgtgcaaggcctctggcacttaggagaggcttttgcccctttgtcctctgagcagaagggttggcaaagagggaaggggacaggccagttctgcacctggcctttctccagaatgaaggcctccaccacccgtccgttcccacagaaagaaaagtaaactgttttcgcggctgcgcagaaagaagaacatggtaggtgcagtgagtgctgcggaggggcgcagaggcccgcgccctggctggccctgtgcatgctgccttgcgccctgctcccaggtgctcactaacccgtaatctggctctgtgtgcagtgctgcccggcagggctgtcgtgtgcgtgttgggtgggaaggcggaggcggcgcggggcgggctggcctctgagcatctggctgcatttagcacg

SEQ ID NO: 440 - DNA, 504 bp, synthetic construct
  misc_feature 1..504: note = Synthetic
  source 1..504: mol_type = other DNA
gagcctcctgcccctcaccaggccctgttagcatcacctcgggcacctggccacagcaggggccagtcagggcaccccgggatagcacgcccaggccctgtgcaaggcctctggcacttaggagaggcttttgcccctttgtcctctgagcagaagggttggcaaagagggaaggggacaggccagttctgcacctggcctttctccagaatgaaggcctccaccacccgtccgttcccacagaaagaaaagtaaactgttttcgcggctgcgcagaaagaagaacatggtaggtgcagtgagtgctgcggaggggcgcagaggcccgcgccctggctggccctgtgcatgctgccttgcgccctgctcccaggtgctcactaacccgtaatctggctctgtgtgcatgtgctgcccggcagggctgtcgtgtgcgtgttgggtgggaaggcggaggcggcgcggggcgggctggcctctgagcatctggctgcatttagcacg

SEQ ID NO: 441 - DNA, 505 bp, synthetic construct
  misc_feature 1..505: note = Synthetic
  source 1..505: mol_type = other DNA
gagcctcctgcccctcaccaggccctgttagcatcacctcgggcacctggccacagcaggggccagtcagggcaccccgggatagcacgcccaggccctgtgcaaggcctctggcacttaggagaggcttttgcccctttgtcctctgagcagaagggttggcaaagagggaaggggacaggccagttctgcacctggcctttctccagaatgaaggcctccaccacccgtccgttcccacagaaagaaaagtaaactgttttcgcggctgcgcagaaagaagaacatggtaggtgcagtgagtgctgcggaggggcgcagaggcccgcgccctggctggccctgtgcatgctgccttgcgccctgctcccaggtgctcactaacccgtaatctgctgctctgtgtgcagtgctgcccggcagggctgtcgtgtgcgtgttgggtgggaaggcggaggcggcgcggggcgggctggcctctgagcatctggctgcatttagcacg

SEQ ID NO: 442 - DNA, 506 bp, synthetic construct
  misc_feature 1..506: note = Synthetic
  source 1..506: mol_type = other DNA
gagcctcctgcccctcaccaggccctgttagcatcacctcgggcacctggccacagcaggggccagtcagggcaccccgggatagcacgcccaggccctgtgcaaggcctctggcacttaggagaggcttttgcccctttgtcctctgagcagaagggttggcaaagagggaaggggacaggccagttctgcacctggcctttctccagaatgaaggcctccaccacccgtccgttcccacagaaagaaaagtaaactgttttcgcggctgcgcagaaagaagaacatggtaggtgcagtgagtgctgcggaggggcgcagaggcccgcgccctggctggccctgtgcatgctgccttgcgccctgctcccaggtgctcactaacccgtaatctgctgctctgtgtgcatgtgctgcccggcagggctgtcgtgtgcgtgttgggtgggaaggcggaggcggcgcggggcgggctggcctctgagcatctggctgcatttagcacg

SEQ ID NO: 443 - DNA, 501 bp, synthetic construct
  misc_feature 1..501: note = Synthetic
  source 1..501: mol_type = other DNA
gagcctcctgcccctcaccaggccctgttagcatcacctcgggcacctggccacagcaggggccagtcagggcaccccgggatagcacgcccaggccctgtgcaaggcctctggcacttaggagaggcttttgcccctttgtcctctgagcagaagggttggcaaagagggaaggggacaggccagttctgcacctggcctttctccagaatgaaggcctccaccacccgtccgttcccacagaaagaaaagtaaactgttttcgcggctgcgcagaaagaagaacatggtatgtgcagtgagtgctgcggaggggcgcagaggcccgcgccctggctggccctgtgcatgcgccttgcgccctgctcccaggtgccactaacccgtaatctggctctgtgtgcagtgctgcccggcagggctgtcgtgtgcgtgttgggtgggaaggcggaggcggcgcggggcgggctggcctctgagcatctggctgcatttagcacg

SEQ ID NO: 444 - DNA, 502 bp, synthetic construct
  misc_feature 1..502: note = Synthetic
  source 1..502: mol_type = other DNA
gagcctcctgcccctcaccaggccctgttagcatcacctcgggcacctggccacagcaggggccagtcagggcaccccgggatagcacgcccaggccctgtgcaaggcctctggcacttaggagaggcttttgcccctttgtcctctgagcagaagggttggcaaagagggaaggggacaggccagttctgcacctggcctttctccagaatgaaggcctccaccacccgtccgttcccacagaaagaaaagtaaactgttttcgcggctgcgcagaaagaagaacatggtatgtgcagtgagtgctgcggaggggcgcagaggcccgcgccctggctggccctgtgcatgcgccttgcgccctgctcccaggtgccactaacccgtaatctggctctgtgtgcatgtgctgcccggcagggctgtcgtgtgcgtgttgggtgggaaggcggaggcggcgcggggcgggctggcctctgagcatctggctgcatttagcacg

SEQ ID NO: 445 - DNA, 503 bp, synthetic construct
  misc_feature 1..503: note = Synthetic
  source 1..503: mol_type = other DNA
gagcctcctgcccctcaccaggccctgttagcatcacctcgggcacctggccacagcaggggccagtcagggcaccccgggatagcacgcccaggccctgtgcaaggcctctggcacttaggagaggcttttgcccctttgtcctctgagcagaagggttggcaaagagggaaggggacaggccagttctgcacctggcctttctccagaatgaaggcctccaccacccgtccgttcccacagaaagaaaagtaaactgttttcgcggctgcgcagaaagaagaacatggtatgtgcagtgagtgctgcggaggggcgcagaggcccgcgccctggctggccctgtgcatgcgccttgcgccctgctcccaggtgccactaacccgtaatctgctgctctgtgtgcagtgctgcccggcagggctgtcgtgtgcgtgttgggtgggaaggcggaggcggcgcggggcgggctggcctctgagcatctggctgcatttagcacg

SEQ ID NO: 446 - DNA, 504 bp, synthetic construct
  misc_feature 1..504: note = Synthetic
  source 1..504: mol_type = other DNA
gagcctcctgcccctcaccaggccctgttagcatcacctcgggcacctggccacagcaggggccagtcagggcaccccgggatagcacgcccaggccctgtgcaaggcctctggcacttaggagaggcttttgcccctttgtcctctgagcagaagggttggcaaagagggaaggggacaggccagttctgcacctggcctttctccagaatgaaggcctccaccacccgtccgttcccacagaaagaaaagtaaactgttttcgcggctgcgcagaaagaagaacatggtatgtgcagtgagtgctgcggaggggcgcagaggcccgcgccctggctggccctgtgcatgcgccttgcgccctgctcccaggtgccactaacccgtaatctgctgctctgtgtgcatgtgctgcccggcagggctgtcgtgtgcgtgttgggtgggaaggcggaggcggcgcggggcgggctggcctctgagcatctggctgcatttagcacg

SEQ ID NO: 447 - DNA, 502 bp, synthetic construct
  misc_feature 1..502: note = Synthetic
  source 1..502: mol_type = other DNA
gagcctcctgcccctcaccaggccctgttagcatcacctcgggcacctggccacagcaggggccagtcagggcaccccgggatagcacgcccaggccctgtgcaaggcctctggcacttaggagaggcttttgcccctttgtcctctgagcagaagggttggcaaagagggaaggggacaggccagttctgcacctggcctttctccagaatgaaggcctccaccacccgtccgttcccacagaaagaaaagtaaactgttttcgcggctgcgcagaaagaagaacatggtatgtgcagtgagtgctgcggaggggcgcagaggcccgcgccctggctggccctgtgcatgcgccttgcgccctgctcccaggtgctcactaacccgtaatctggctctgtgtgcagtgctgcccggcagggctgtcgtgtgcgtgttgggtgggaaggcggaggcggcgcggggcgggctggcctctgagcatctggctgcatttagcacg

SEQ ID NO: 448 - DNA, 503 bp, synthetic construct
  misc_feature 1..503: note = Synthetic
  source 1..503: mol_type = other DNA
gagcctcctgcccctcaccaggccctgttagcatcacctcgggcacctggccacagcaggggccagtcagggcaccccgggatagcacgcccaggccctgtgcaaggcctctggcacttaggagaggcttttgcccctttgtcctctgagcagaagggttggcaaagagggaaggggacaggccagttctgcacctggcctttctccagaatgaaggcctccaccacccgtccgttcccacagaaagaaaagtaaactgttttcgcggctgcgcagaaagaagaacatggtatgtgcagtgagtgctgcggaggggcgcagaggcccgcgccctggctggccctgtgcatgcgccttgcgccctgctcccaggtgctcactaacccgtaatctggctctgtgtgcatgtgctgcccggcagggctgtcgtgtgcgtgttgggtgggaaggcggaggcggcgcggggcgggctggcctctgagcatctggctgcatttagcacg

SEQ ID NO: 449 - DNA, 504 bp, synthetic construct
  misc_feature 1..504: note = Synthetic
  source 1..504: mol_type = other DNA
gagcctcctgcccctcaccaggccctgttagcatcacctcgggcacctggccacagcaggggccagtcagggcaccccgggatagcacgcccaggccctgtgcaaggcctctggcacttaggagaggcttttgcccctttgtcctctgagcagaagggttggcaaagagggaaggggacaggccagttctgcacctggcctttctccagaatgaaggcctccaccacccgtccgttcccacagaaagaaaagtaaactgttttcgcggctgcgcagaaagaagaacatggtatgtgcagtgagtgctgcggaggggcgcagaggcccgcgccctggctggccctgtgcatgcgccttgcgccctgctcccaggtgctcactaacccgtaatctgctgctctgtgtgcagtgctgcccggcagggctgtcgtgtgcgtgttgggtgggaaggcggaggcggcgcggggcgggctggcctctgagcatctggctgcatttagcacg

SEQ ID NO: 450 - DNA, 505 bp, synthetic construct
  misc_feature 1..505: note = Synthetic
  source 1..505: mol_type = other DNA
gagcctcctgcccctcaccaggccctgttagcatcacctcgggcacctggccacagcaggggccagtcagggcaccccgggatagcacgcccaggccctgtgcaaggcctctggcacttaggagaggcttttgcccctttgtcctctgagcagaagggttggcaaagagggaaggggacaggccagttctgcacctggcctttctccagaatgaaggcctccaccacccgtccgttcccacagaaagaaaagtaaactgttttcgcggctgcgcagaaagaagaacatggtatgtgcagtgagtgctgcggaggggcgcagaggcccgcgccctggctggccctgtgcatgcgccttgcgccctgctcccaggtgctcactaacccgtaatctgctgctctgtgtgcatgtgctgcccggcagggctgtcgtgtgcgtgttgggtgggaaggcggaggcggcgcggggcgggctggcctctgagcatctggctgcatttagcacg

SEQ ID NO: 451 - DNA, 502 bp, synthetic construct
  misc_feature 1..502: note = Synthetic
  source 1..502: mol_type = other DNA
gagcctcctgcccctcaccaggccctgttagcatcacctcgggcacctggccacagcaggggccagtcagggcaccccgggatagcacgcccaggccctgtgcaaggcctctggcacttaggagaggcttttgcccctttgtcctctgagcagaagggttggcaaagagggaaggggacaggccagttctgcacctggcctttctccagaatgaaggcctccaccacccgtccgttcccacagaaagaaaagtaaactgttttcgcggctgcgcagaaagaagaacatggtatgtgcagtgagtgctgcggaggggcgcagaggcccgcgccctggctggccctgtgcatgctgccttgcgccctgctcccaggtgccactaacccgtaatctggctctgtgtgcagtgctgcccggcagggctgtcgtgtgcgtgttgggtgggaaggcggaggcggcgcggggcgggctggcctctgagcatctggctgcatttagcacg

SEQ ID NO: 452 - DNA, 503 bp, synthetic construct
  misc_feature 1..503: note = Synthetic
  source 1..503: mol_type = other DNA
gagcctcctgcccctcaccaggccctgttagcatcacctcgggcacctggccacagcaggggccagtcagggcaccccgggatagcacgcccaggccctgtgcaaggcctctggcacttaggagaggcttttgcccctttgtcctctgagcagaagggttggcaaagagggaaggggacaggccagttctgcacctggcctttctccagaatgaaggcctccaccacccgtccgttcccacagaaagaaaagtaaactgttttcgcggctgcgcagaaagaagaacatggtatgtgcagtgagtgctgcggaggggcgcagaggcccgcgccctggctggccctgtgcatgctgccttgcgccctgctcccaggtgccactaacccgtaatctggctctgtgtgcatgtgctgcccggcagggctgtcgtgtgcgtgttgggtgggaaggcggaggcggcgcggggcgggctggcctctgagcatctggctgcatttagcacg

SEQ ID NO: 453 - DNA, 504 bp, synthetic construct
  misc_feature 1..504: note = Synthetic
  source 1..504: mol_type = other DNA
gagcctcctgcccctcaccaggccctgttagcatcacctcgggcacctggccacagcaggggccagtcagggcaccccgggatagcacgcccaggccctgtgcaaggcctctggcacttaggagaggcttttgcccctttgtcctctgagcagaagggttggcaaagagggaaggggacaggccagttctgcacctggcctttctccagaatgaaggcctccaccacccgtccgttcccacagaaagaaaagtaaactgttttcgcggctgcgcagaaagaagaacatggtatgtgcagtgagtgctgcggaggggcgcagaggcccgcgccctggctggccctgtgcatgctgccttgcgccctgctcccaggtgccactaacccgtaatctgctgctctgtgtgcagtgctgcccggcagggctgtcgtgtgcgtgttgggtgggaaggcggaggcggcgcggggcgggctggcctctgagcatctggctgcatttagcacg

SEQ ID NO: 454 - DNA, 505 bp, synthetic construct
  misc_feature 1..505: note = Synthetic
  source 1..505: mol_type = other DNA
gagcctcctgcccctcaccaggccctgttagcatcacctcgggcacctggccacagcaggggccagtcagggcaccccgggatagcacgcccaggccctgtgcaaggcctctggcacttaggagaggcttttgcccctttgtcctctgagcagaagggttggcaaagagggaaggggacaggccagttctgcacctggcctttctccagaatgaaggcctccaccacccgtccgttcccacagaaagaaaagtaaactgttttcgcggctgcgcagaaagaagaacatggtatgtgcagtgagtgctgcggaggggcgcagaggcccgcgccctggctggccctgtgcatgctgccttgcgccctgctcccaggtgccactaacccgtaatctgctgctctgtgtgcatgtgctgcccggcagggctgtcgtgtgcgtgttgggtgggaaggcggaggcggcgcggggcgggctggcctctgagcatctggctgcatttagcacg

SEQ ID NO: 455 - DNA, 503 bp, synthetic construct
  misc_feature 1..503: note = Synthetic
  source 1..503: mol_type = other DNA
gagcctcctgcccctcaccaggccctgttagcatcacctcgggcacctggccacagcaggggccagtcagggcaccccgggatagcacgcccaggccctgtgcaaggcctctggcacttaggagaggcttttgcccctttgtcctctgagcagaagggttggcaaagagggaaggggacaggccagttctgcacctggcctttctccagaatgaaggcctccaccacccgtccgttcccacagaaagaaaagtaaactgttttcgcggctgcgcagaaagaagaacatggtatgtgcagtgagtgctgcggaggggcgcagaggcccgcgccctggctggccctgtgcatgctgccttgcgccctgctcccaggtgctcactaacccgtaatctggctctgtgtgcagtgctgcccggcagggctgtcgtgtgcgtgttgggtgggaaggcggaggcggcgcggggcgggctggcctctgagcatctggctgcatttagcacg

SEQ ID NO: 456 - DNA, 504 bp, synthetic construct
  misc_feature 1..504: note = Synthetic
  source 1..504: mol_type = other DNA
gagcctcctgcccctcaccaggccctgttagcatcacctcgggcacctggccacagcaggggccagtcagggcaccccgggatagcacgcccaggccctgtgcaaggcctctggcacttaggagaggcttttgcccctttgtcctctgagcagaagggttggcaaagagggaaggggacaggccagttctgcacctggcctttctccagaatgaaggcctccaccacccgtccgttcccacagaaagaaaagtaaactgttttcgcggctgcgcagaaagaagaacatggtatgtgcagtgagtgctgcggaggggcgcagaggcccgcgccctggctggccctgtgcatgctgccttgcgccctgctcccaggtgctcactaacccgtaatctggctctgtgtgcatgtgctgcccggcagggctgtcgtgtgcgtgttgggtgggaaggcggaggcggcgcggggcgggctggcctctgagcatctggctgcatttagcacg

SEQ ID NO: 457 - DNA, 505 bp, synthetic construct
  misc_feature 1..505: note = Synthetic
  source 1..505: mol_type = other DNA
gagcctcctgcccctcaccaggccctgttagcatcacctcgggcacctggccacagcaggggccagtcagggcaccccgggatagcacgcccaggccctgtgcaaggcctctggcacttaggagaggcttttgcccctttgtcctctgagcagaagggttggcaaagagggaaggggacaggccagttctgcacctggcctttctccagaatgaaggcctccaccacccgtccgttcccacagaaagaaaagtaaactgttttcgcggctgcgcagaaagaagaacatggtatgtgcagtgagtgctgcggaggggcgcagaggcccgcgccctggctggccctgtgcatgctgccttgcgccctgctcccaggtgctcactaacccgtaatctgctgctctgtgtgcagtgctgcccggcagggctgtcgtgtgcgtgttgggtgggaaggcggaggcggcgcggggcgggctggcctctgagcatctggctgcatttagcacg

SEQ ID NO: 458 - DNA, 506 bp, synthetic construct
  misc_feature 1..506: note = Synthetic
  source 1..506: mol_type = other DNA
gagcctcctgcccctcaccaggccctgttagcatcacctcgggcacctggccacagcaggggccagtcagggcaccccgggatagcacgcccaggccctgtgcaaggcctctggcacttaggagaggcttttgcccctttgtcctctgagcagaagggttggcaaagagggaaggggacaggccagttctgcacctggcctttctccagaatgaaggcctccaccacccgtccgttcccacagaaagaaaagtaaactgttttcgcggctgcgcagaaagaagaacatggtatgtgcagtgagtgctgcggaggggcgcagaggcccgcgccctggctggccctgtgcatgctgccttgcgccctgctcccaggtgctcactaacccgtaatctgctgctctgtgtgcatgtgctgcccggcagggctgtcgtgtgcgtgttgggtgggaaggcggaggcggcgcggggcgggctggcctctgagcatctggctgcatttagcacg

SEQ ID NO: 459 - DNA, 501 bp, synthetic construct
  misc_feature 1..501: note = Synthetic
  source 1..501: mol_type = other DNA
gagcctcctgcccctcaccaggccctgttagcatcacctcgggcacctggccacagcaggggccagtcagggcaccccgggatagcacgcccaggccctgtgcaaggcctctggcacttaggagaggcttttgcccctttgtcctctgagcagaagggttggcaaagagggaaggggacaggccagttctgcacctggcctttctccagaatgaaggcctccaccacccgtccgttcccacagaaagaaaagtaaactgttttcgcggctgcgcagaaagaagaacatggtacgagcagtgagtgctgcggaggggcgcagaggcccgcgccctggctggccctgtgcatgcgccttgcgccctgctcccaggtgccactaacccgtaatctggctctgtgtgcagtgctgcccggcagggctgtcgtgtgcgtgttgggtgggaaggcggaggcggcgcggggcgggctggcctctgagcatctggctgcatttagcacg

SEQ ID NO: 460 - DNA, 502 bp, synthetic construct
  misc_feature 1..502: note = Synthetic
  source 1..502: mol_type = other DNA
gagcctcctgcccctcaccaggccctgttagcatcacctcgggcacctggccacagcaggggccagtcagggcaccccgggatagcacgcccaggccctgtgcaaggcctctggcacttaggagaggcttttgcccctttgtcctctgagcagaagggttggcaaagagggaaggggacaggccagttctgcacctggcctttctccagaatgaaggcctccaccacccgtccgttcccacagaaagaaaagtaaactgttttcgcggctgcgcagaaagaagaacatggtacgagcagtgagtgctgcggaggggcgcagaggcccgcgccctggctggccctgtgcatgcgccttgcgccctgctcccaggtgccactaacccgtaatctggctctgtgtgcatgtgctgcccggcagggctgtcgtgtgcgtgttgggtgggaaggcggaggcggcgcggggcgggctggcctctgagcatctggctgcatttagcacg

SEQ ID NO: 461 - DNA, 503 bp, synthetic construct
  misc_feature 1..503: note = Synthetic
  source 1..503: mol_type = other DNA
gagcctcctgcccctcaccaggccctgttagcatcacctcgggcacctggccacagcaggggccagtcagggcaccccgggatagcacgcccaggccctgtgcaaggcctctggcacttaggagaggcttttgcccctttgtcctctgagcagaagggttggcaaagagggaaggggacaggccagttctgcacctggcctttctccagaatgaaggcctccaccacccgtccgttcccacagaaagaaaagtaaactgttttcgcggctgcgcagaaagaagaacatggtacgagcagtgagtgctgcggaggggcgcagaggcccgcgccctggctggccctgtgcatgcgccttgcgccctgctcccaggtgccactaacccgtaatctgctgctctgtgtgcagtgctgcccggcagggctgtcgtgtgcgtgttgggtgggaaggcggaggcggcgcggggcgggctggcctctgagcatctggctgcatttagcacg

SEQ ID NO: 462 - DNA, 504 bp, synthetic construct
  misc_feature 1..504: note = Synthetic
  source 1..504: mol_type = other DNA
gagcctcctgcccctcaccaggccctgttagcatcacctcgggcacctggccacagcaggggccagtcagggcaccccgggatagcacgcccaggccctgtgcaaggcctctggcacttaggagaggcttttgcccctttgtcctctgagcagaagggttggcaaagagggaaggggacaggccagttctgcacctggcctttctccagaatgaaggcctccaccacccgtccgttcccacagaaagaaaagtaaactgttttcgcggctgcgcagaaagaagaacatggtacgagcagtgagtgctgcggaggggcgcagaggcccgcgccctggctggccctgtgcatgcgccttgcgccctgctcccaggtgccactaacccgtaatctgctgctctgtgtgcatgtgctgcccggcagggctgtcgtgtgcgtgttgggtgggaaggcggaggcggcgcggggcgggctggcctctgagcatctggctgcatttagcacg

SEQ ID NO: 463 - DNA, 502 bp, synthetic construct
  misc_feature 1..502: note = Synthetic
  source 1..502: mol_type = other DNA
gagcctcctgcccctcaccaggccctgttagcatcacctcgggcacctggccacagcaggggccagtcagggcaccccgggatagcacgcccaggccctgtgcaaggcctctggcacttaggagaggcttttgcccctttgtcctctgagcagaagggttggcaaagagggaaggggacaggccagttctgcacctggcctttctccagaatgaaggcctccaccacccgtccgttcccacagaaagaaaagtaaactgttttcgcggctgcgcagaaagaagaacatggtacgagcagtgagtgctgcggaggggcgcagaggcccgcgccctggctggccctgtgcatgcgccttgcgccctgctcccaggtgctcactaacccgtaatctggctctgtgtgcagtgctgcccggcagggctgtcgtgtgcgtgttgggtgggaaggcggaggcggcgcggggcgggctggcctctgagcatctggctgcatttagcacg

SEQ ID NO: 464 - DNA, 503 bp, synthetic construct
  misc_feature 1..503: note = Synthetic
  source 1..503: mol_type = other DNA
gagcctcctgcccctcaccaggccctgttagcatcacctcgggcacctggccacagcaggggccagtcagggcaccccgggatagcacgcccaggccctgtgcaaggcctctggcacttaggagaggcttttgcccctttgtcctctgagcagaagggttggcaaagagggaaggggacaggccagttctgcacctggcctttctccagaatgaaggcctccaccacccgtccgttcccacagaaagaaaagtaaactgttttcgcggctgcgcagaaagaagaacatggtacgagcagtgagtgctgcggaggggcgcagaggcccgcgccctggctggccctgtgcatgcgccttgcgccctgctcccaggtgctcactaacccgtaatctggctctgtgtgcatgtgctgcccggcagggctgtcgtgtgcgtgttgggtgggaaggcggaggcggcgcggggcgggctggcctctgagcatctggctgcatttagcacg

SEQ ID NO: 465 - DNA, 504 bp, synthetic construct
  misc_feature 1..504: note = Synthetic
  source 1..504: mol_type = other DNA
gagcctcctgcccctcaccaggccctgttagcatcacctcgggcacctggccacagcaggggccagtcagggcaccccgggatagcacgcccaggccctgtgcaaggcctctggcacttaggagaggcttttgcccctttgtcctctgagcagaagggttggcaaagagggaaggggacaggccagttctgcacctggcctttctccagaatgaaggcctccaccacccgtccgttcccacagaaagaaaagtaaactgttttcgcggctgcgcagaaagaagaacatggtacgagcagtgagtgctgcggaggggcgcagaggcccgcgccctggctggccctgtgcatgcgccttgcgccctgctcccaggtgctcactaacccgtaatctgctgctctgtgtgcagtgctgcccggcagggctgtcgtgtgcgtgttgggtgggaaggcggaggcggcgcggggcgggctggcctctgagcatctggctgcatttagcacg

SEQ ID NO: 466 - DNA, 505 bp, synthetic construct
  misc_feature 1..505: note = Synthetic
  source 1..505: mol_type = other DNA
gagcctcctgcccctcaccaggccctgttagcatcacctcgggcacctggccacagcaggggccagtcagggcaccccgggatagcacgcccaggccctgtgcaaggcctctggcacttaggagaggcttttgcccctttgtcctctgagcagaagggttggcaaagagggaaggggacaggccagttctgcacctggcctttctccagaatgaaggcctccaccacccgtccgttcccacagaaagaaaagtaaactgttttcgcggctgcgcagaaagaagaacatggtacgagcagtgagtgctgcggaggggcgcagaggcccgcgccctggctggccctgtgcatgcgccttgcgccctgctcccaggtgctcactaacccgtaatctgctgctctgtgtgcatgtgctgcccggcagggctgtcgtgtgcgtgttgggtgggaaggcggaggcggcgcggggcgggctggcctctgagcatctggctgcatttagcacg

SEQ ID NO: 467 - DNA, 502 bp, synthetic construct
  misc_feature 1..502: note = Synthetic
  source 1..502: mol_type = other DNA
gagcctcctgcccctcaccaggccctgttagcatcacctcgggcacctggccacagcaggggccagtcagggcaccccgggatagcacgcccaggccctgtgcaaggcctctggcacttaggagaggcttttgcccctttgtcctctgagcagaagggttggcaaagagggaaggggacaggccagttctgcacctggcctttctccagaatgaaggcctccaccacccgtccgttcccacagaaagaaaagtaaactgttttcgcggctgcgcagaaagaagaacatggtacgagcagtgagtgctgcggaggggcgcagaggcccgcgccctggctggccctgtgcatgctgccttgcgccctgctcccaggtgccactaacccgtaatctggctctgtgtgcagtgctgcccggcagggctgtcgtgtgcgtgttgggtgggaaggcggaggcggcgcggggcgggctggcctctgagcatctggctgcatttagcacg

SEQ ID NO: 468 - DNA, 503 bp, synthetic construct
  misc_feature 1..503: note = Synthetic
  source 1..503: mol_type = other DNA
gagcctcctgcccctcaccaggccctgttagcatcacctcgggcacctggccacagcaggggccagtcagggcaccccgggatagcacgcccaggccctgtgcaaggcctctggcacttaggagaggcttttgcccctttgtcctctgagcagaagggttggcaaagagggaaggggacaggccagttctgcacctggcctttctccagaatgaaggcctccaccacccgtccgttcccacagaaagaaaagtaaactgttttcgcggctgcgcagaaagaagaacatggtacgagcagtgagtgctgcggaggggcgcagaggcccgcgccctggctggccctgtgcatgctgccttgcgccctgctcccaggtgccactaacccgtaatctggctctgtgtgcatgtgctgcccggcagggctgtcgtgtgcgtgttgggtgggaaggcggaggcggcgcggggcgggctggcctctgagcatctggctgcatttagcacg

SEQ ID NO: 469 - DNA, 504 bp, synthetic construct
  misc_feature 1..504: note = Synthetic
  source 1..504: mol_type = other DNA
gagcctcctgcccctcaccaggccctgttagcatcacctcgggcacctggccacagcaggggccagtcagggcaccccgggatagcacgcccaggccctgtgcaaggcctctggcacttaggagaggcttttgcccctttgtcctctgagcagaagggttggcaaagagggaaggggacaggccagttctgcacctggcctttctccagaatgaaggcctccaccacccgtccgttcccacagaaagaaaagtaaactgttttcgcggctgcgcagaaagaagaacatggtacgagcagtgagtgctgcggaggggcgcagaggcccgcgccctggctggccctgtgcatgctgccttgcgccctgctcccaggtgccactaacccgtaatctgctgctctgtgtgcagtgctgcccggcagggctgtcgtgtgcgtgttgggtgggaaggcggaggcggcgcggggcgggctggcctctgagcatctggctgcatttagcacg

SEQ ID NO: 470 - DNA, 505 bp, synthetic construct
  misc_feature 1..505: note = Synthetic
  source 1..505: mol_type = other DNA
gagcctcctgcccctcaccaggccctgttagcatcacctcgggcacctggccacagcaggggccagtcagggcaccccgggatagcacgcccaggccctgtgcaaggcctctggcacttaggagaggcttttgcccctttgtcctctgagcagaagggttggcaaagagggaaggggacaggccagttctgcacctggcctttctccagaatgaaggcctccaccacccgtccgttcccacagaaagaaaagtaaactgttttcgcggctgcgcagaaagaagaacatggtacgagcagtgagtgctgcggaggggcgcagaggcccgcgccctggctggccctgtgcatgctgccttgcgccctgctcccaggtgccactaacccgtaatctgctgctctgtgtgcatgtgctgcccggcagggctgtcgtgtgcgtgttgggtgggaaggcggaggcggcgcggggcgggctggcctctgagcatctggctgcatttagcacg

SEQ ID NO: 471 - DNA, 503 bp, synthetic construct
  misc_feature 1..503: note = Synthetic
  source 1..503: mol_type = other DNA
gagcctcctgcccctcaccaggccctgttagcatcacctcgggcacctggccacagcaggggccagtcagggcaccccgggatagcacgcccaggccctgtgcaaggcctctggcacttaggagaggcttttgcccctttgtcctctgagcagaagggttggcaaagagggaaggggacaggccagttctgcacctggcctttctccagaatgaaggcctccaccacccgtccgttcccacagaaagaaaagtaaactgttttcgcggctgcgcagaaagaagaacatggtacgagcagtgagtgctgcggaggggcgcagaggcccgcgccctggctggccctgtgcatgctgccttgcgccctgctcccaggtgctcactaacccgtaatctggctctgtgtgcagtgctgcccggcagggctgtcgtgtgcgtgttgggtgggaaggcggaggcggcgcggggcgggctggcctctgagcatctggctgcatttagcacg

SEQ ID NO: 472 - DNA, 504 bp, synthetic construct
  misc_feature 1..504: note = Synthetic
  source 1..504: mol_type = other DNA
gagcctcctgcccctcaccaggccctgttagcatcacctcgggcacctggccacagcaggggccagtcagggcaccccgggatagcacgcccaggccctgtgcaaggcctctggcacttaggagaggcttttgcccctttgtcctctgagcagaagggttggcaaagagggaaggggacaggccagttctgcacctggcctttctccagaatgaaggcctccaccacccgtccgttcccacagaaagaaaagtaaactgttttcgcggctgcgcagaaagaagaacatggtacgagcagtgagtgctgcggaggggcgcagaggcccgcgccctggctggccctgtgcatgctgccttgcgccctgctcccaggtgctcactaacccgtaatctggctctgtgtgcatgtgctgcccggcagggctgtcgtgtgcgtgttgggtgggaaggcggaggcggcgcggggcgggctggcctctgagcatctggctgcatttagcacg

SEQ ID NO: 473 - DNA, 505 bp, synthetic construct
  misc_feature 1..505: note = Synthetic
  source 1..505: mol_type = other DNA
gagcctcctgcccctcaccaggccctgttagcatcacctcgggcacctggccacagcaggggccagtcagggcaccccgggatagcacgcccaggccctgtgcaaggcctctggcacttaggagaggcttttgcccctttgtcctctgagcagaagggttggcaaagagggaaggggacaggccagttctgcacctggcctttctccagaatgaaggcctccaccacccgtccgttcccacagaaagaaaagtaaactgttttcgcggctgcgcagaaagaagaacatggtacgagcagtgagtgctgcggaggggcgcagaggcccgcgccctggctggccctgtgcatgctgccttgcgccctgctcccaggtgctcactaacccgtaatctgctgctctgtgtgcagtgctgcccggcagggctgtcgtgtgcgtgttgggtgggaaggcggaggcggcgcggggcgggctggcctctgagcatctggctgcatttagcacg

SEQ ID NO: 474 - DNA, 506 bp, synthetic construct
  misc_feature 1..506: note = Synthetic
  source 1..506: mol_type = other DNA
gagcctcctgcccctcaccaggccctgttagcatcacctcgggcacctggccacagcaggggccagtcagggcaccccgggatagcacgcccaggccctgtgcaaggcctctggcacttaggagaggcttttgcccctttgtcctctgagcagaagggttggcaaagagggaaggggacaggccagttctgcacctggcctttctccagaatgaaggcctccaccacccgtccgttcccacagaaagaaaagtaaactgttttcgcggctgcgcagaaagaagaacatggtacgagcagtgagtgctgcggaggggcgcagaggcccgcgccctggctggccctgtgcatgctgccttgcgccctgctcccaggtgctcactaacccgtaatctgctgctctgtgtgcatgtgctgcccggcagggctgtcgtgtgcgtgttgggtgggaaggcggaggcggcgcggggcgggctggcctctgagcatctggctgcatttagcacg

SEQ ID NO: 475 - DNA, 501 bp, synthetic construct
  misc_feature 1..501: note = Synthetic
  source 1..501: mol_type = other DNA
gagcctcctgcccctcaccaggccctgttagcatcacctcgggcacctggccacagcaggggccagtcagggcaccccgggatagcacgcccaggccctgtgcaaggcctctggcacttaggagaggcttttgcccctttgtcctctgagcagaagggttggcaaagagggaaggggacaggccagttctgcacctggcctttctccagaatgaaggcctccaccacccgtccgttcccacagaaagaaaagtaaactgttttcgcggctgcgcagaaagaagaacatggttcgtgcagtgagtgctgcggaggggcgcagaggcccgcgccctggctggccctgtgcatgcgccttgcgccctgctcccaggtgccactaacccgtaatctggctctgtgtgcagtgctgcccggcagggctgtcgtgtgcgtgttgggtgggaaggcggaggcggcgcggggcgggctggcctctgagcatctggctgcatttagcacg

SEQ ID NO: 476 - DNA, 502 bp, synthetic construct
  misc_feature 1..502: note = Synthetic
  source 1..502: mol_type = other DNA
gagcctcctgcccctcaccaggccctgttagcatcacctcgggcacctggccacagcaggggccagtcagggcaccccgggatagcacgcccaggccctgtgcaaggcctctggcacttaggagaggcttttgcccctttgtcctctgagcagaagggttggcaaagagggaaggggacaggccagttctgcacctggcctttctccagaatgaaggcctccaccacccgtccgttcccacagaaagaaaagtaaactgttttcgcggctgcgcagaaagaagaacatggttcgtgcagtgagtgctgcggaggggcgcagaggcccgcgccctggctggccctgtgcatgcgccttgcgccctgctcccaggtgccactaacccgtaatctggctctgtgtgcatgtgctgcccggcagggctgtcgtgtgcgtgttgggtgggaaggcggaggcggcgcggggcgggctggcctctgagcatctggctgcatttagcacg

SEQ ID NO: 477 - DNA, 503 bp, synthetic construct
  misc_feature 1..503: note = Synthetic
  source 1..503: mol_type = other DNA
gagcctcctgcccctcaccaggccctgttagcatcacctcgggcacctggccacagcaggggccagtcagggcaccccgggatagcacgcccaggccctgtgcaaggcctctggcacttaggagaggcttttgcccctttgtcctctgagcagaagggttggcaaagagggaaggggacaggccagttctgcacctggcctttctccagaatgaaggcctccaccacccgtccgttcccacagaaagaaaagtaaactgttttcgcggctgcgcagaaagaagaacatggttcgtgcagtgagtgctgcggaggggcgcagaggcccgcgccctggctggccctgtgcatgcgccttgcgccctgctcccaggtgccactaacccgtaatctgctgctctgtgtgcagtgctgcccggcagggctgtcgtgtgcgtgttgggtgggaaggcggaggcggcgcggggcgggctggcctctgagcatctggctgcatttagcacg

SEQ ID NO: 478 - DNA, 504 bp, synthetic construct
  misc_feature 1..504: note = Synthetic
  source 1..504: mol_type = other DNA
gagcctcctgcccctcaccaggccctgttagcatcacctcgggcacctggccacagcaggggccagtcagggcaccccgggatagcacgcccaggccctgtgcaaggcctctggcacttaggagaggcttttgcccctttgtcctctgagcagaagggttggcaaagagggaaggggacaggccagttctgcacctggcctttctccagaatgaaggcctccaccacccgtccgttcccacagaaagaaaagtaaactgttttcgcggctgcgcagaaagaagaacatggttcgtgcagtgagtgctgcggaggggcgcagaggcccgcgccctggctggccctgtgcatgcgccttgcgccctgctcccaggtgccactaacccgtaatctgctgctctgtgtgcatgtgctgcccggcagggctgtcgtgtgcgtgttgggtgggaaggcggaggcggcgcggggcgggctggcctctgagcatctggctgcatttagcacg

SEQ ID NO: 479 - DNA, 502 bp, synthetic construct
  misc_feature 1..502: note = Synthetic
  source 1..502: mol_type = other DNA
gagcctcctgcccctcaccaggccctgttagcatcacctcgggcacctggccacagcaggggccagtcagggcaccccgggatagcacgcccaggccctgtgcaaggcctctggcacttaggagaggcttttgcccctttgtcctctgagcagaagggttggcaaagagggaaggggacaggccagttctgcacctggcctttctccagaatgaaggcctccaccacccgtccgttcccacagaaagaaaagtaaactgttttcgcggctgcgcagaaagaagaacatggttcgtgcagtgagtgctgcggaggggcgcagaggcccgcgccctggctggccctgtgcatgcgccttgcgccctgctcccaggtgctcactaacccgtaatctggctctgtgtgcagtgctgcccggcagggctgtcgtgtgcgtgttgggtgggaaggcggaggcggcgcggggcgggctggcctctgagcatctggctgcatttagcacg

SEQ ID NO: 480 - DNA, 503 bp, synthetic construct
  misc_feature 1..503: note = Synthetic
  source 1..503: mol_type = other DNA
gagcctcctgcccctcaccaggccctgttagcatcacctcgggcacctggccacagcaggggccagtcagggcaccccgggatagcacgcccaggccctgtgcaaggcctctggcacttaggagaggcttttgcccctttgtcctctgagcagaagggttggcaaagagggaaggggacaggccagttctgcacctggcctttctccagaatgaaggcctccaccacccgtccgttcccacagaaagaaaagtaaactgttttcgcggctgcgcagaaagaagaacatggttcgtgcagtgagtgctgcggaggggcgcagaggcccgcgccctggctggccctgtgcatgcgccttgcgccctgctcccaggtgctcactaacccgtaatctggctctgtgtgcatgtgctgcccggcagggctgtcgtgtgcgtgttgggtgggaaggcggaggcggcgcggggcgggctggcctctgagcatctggctgcatttagcacg

SEQ ID NO: 481 - DNA, 504 bp, synthetic construct
  misc_feature 1..504: note = Synthetic
  source 1..504: mol_type = other DNA
gagcctcctgcccctcaccaggccctgttagcatcacctcgggcacctggccacagcaggggccagtcagggcaccccgggatagcacgcccaggccctgtgcaaggcctctggcacttaggagaggcttttgcccctttgtcctctgagcagaagggttggcaaagagggaaggggacaggccagttctgcacctggcctttctccagaatgaaggcctccaccacccgtccgttcccacagaaagaaaagtaaactgttttcgcggctgcgcagaaagaagaacatggttcgtgcagtgagtgctgcggaggggcgcagaggcccgcgccctggctggccctgtgcatgcgccttgcgccctgctcccaggtgctcactaacccgtaatctgctgctctgtgtgcagtgctgcccggcagggctgtcgtgtgcgtgttgggtgggaaggcggaggcggcgcggggcgggctggcctctgagcatctggctgcatttagcacg

SEQ ID NO: 482 - DNA, 505 bp, synthetic construct
  misc_feature 1..505: note = Synthetic
  source 1..505: mol_type = other DNA
gagcctcctgcccctcaccaggccctgttagcatcacctcgggcacctggccacagcaggggccagtcagggcaccccgggatagcacgcccaggccctgtgcaaggcctctggcacttaggagaggcttttgcccctttgtcctctgagcagaagggttggcaaagagggaaggggacaggccagttctgcacctggcctttctccagaatgaaggcctccaccacccgtccgttcccacagaaagaaaagtaaactgttttcgcggctgcgcagaaagaagaacatggttcgtgcagtgagtgctgcggaggggcgcagaggcccgcgccctggctggccctgtgcatgcgccttgcgccctgctcccaggtgctcactaacccgtaatctgctgctctgtgtgcatgtgctgcccggcagggctgtcgtgtgcgtgttgggtgggaaggcggaggcggcgcggggcgggctggcctctgagcatctggctgcatttagcacg

SEQ ID NO: 483 - DNA, 502 bp, synthetic construct
  misc_feature 1..502: note = Synthetic
  source 1..502: mol_type = other DNA
gagcctcctgcccctcaccaggccctgttagcatcacctcgggcacctggccacagcaggggccagtcagggcaccccgggatagcacgcccaggccctgtgcaaggcctctggcacttaggagaggcttttgcccctttgtcctctgagcagaagggttggcaaagagggaaggggacaggccagttctgcacctggcctttctccagaatgaaggcctccaccacccgtccgttcccacagaaagaaaagtaaactgttttcgcggctgcgcagaaagaagaacatggttcgtgcagtgagtgctgcggaggggcgcagaggcccgcgccctggctggccctgtgcatgctgccttgcgccctgctcccaggtgccactaacccgtaatctggctctgtgtgcagtgctgcccggcagggctgtcgtgtgcgtgttgggtgggaaggcggaggcggcgcggggcgggctggcctctgagcatctggctgcatttagcacg

SEQ ID NO: 484 - DNA, 503 bp, synthetic construct
  misc_feature 1..503: note = Synthetic
  source 1..503: mol_type = other DNA
gagcctcctgcccctcaccaggccctgttagcatcacctcgggcacctggccacagcaggggccagtcagggcaccccgggatagcacgcccaggccctgtgcaaggcctctggcacttaggagaggcttttgcccctttgtcctctgagcagaagggttggcaaagagggaaggggacaggccagttctgcacctggcctttctccagaatgaaggcctccaccacccgtccgttcccacagaaagaaaagtaaactgttttcgcggctgcgcagaaagaagaacatggttcgtgcagtgagtgctgcggaggggcgcagaggcccgcgccctggctggccctgtgcatgctgccttgcgccctgctcccaggtgccactaacccgtaatctggctctgtgtgcatgtgctgcccggcagggctgtcgtgtgcgtgttgggtgggaaggcggaggcggcgcggggcgggctggcctctgagcatctggctgcatttagcacg

SEQ ID NO: 485 - DNA, 504 bp, synthetic construct
  misc_feature 1..504: note = Synthetic
  source 1..504: mol_type = other DNA
gagcctcctgcccctcaccaggccctgttagcatcacctcgggcacctggccacagcaggggccagtcagggcaccccgggatagcacgcccaggccctgtgcaaggcctctggcacttaggagaggcttttgcccctttgtcctctgagcagaagggttggcaaagagggaaggggacaggccagttctgcacctggcctttctccagaatgaaggcctccaccacccgtccgttcccacagaaagaaaagtaaactgttttcgcggctgcgcagaaagaagaacatggttcgtgcagtgagtgctgcggaggggcgcagaggcccgcgccctggctggccctgtgcatgctgccttgcgccctgctcccaggtgccactaacccgtaatctgctgctctgtgtgcagtgctgcccggcagggctgtcgtgtgcgtgttgggtgggaaggcggaggcggcgcggggcgggctggcctctgagcatctggctgcatttagcacg

SEQ ID NO: 486 - DNA, 505 bp, synthetic construct
  misc_feature 1..505: note = Synthetic
  source 1..505: mol_type = other DNA
gagcctcctgcccctcaccaggccctgttagcatcacctcgggcacctggccacagcaggggccagtcagggcaccccgggatagcacgcccaggccctgtgcaaggcctctggcacttaggagaggcttttgcccctttgtcctctgagcagaagggttggcaaagagggaaggggacaggccagttctgcacctggcctttctccagaatgaaggcctccaccacccgtccgttcccacagaaagaaaagtaaactgttttcgcggctgcgcagaaagaagaacatggttcgtgcagtgagtgctgcggaggggcgcagaggcccgcgccctggctggccctgtgcatgctgccttgcgccctgctcccaggtgccactaacccgtaatctgctgctctgtgtgcatgtgctgcccggcagggctgtcgtgtgcgtgttgggtgggaaggcggaggcggcgcggggcgggctggcctctgagcatctggctgcatttagcacg

SEQ ID NO: 487 - DNA, 503 bp, synthetic construct
  misc_feature 1..503: note = Synthetic
  source 1..503: mol_type = other DNA
gagcctcctgcccctcaccaggccctgttagcatcacctcgggcacctggccacagcaggggccagtcagggcaccccgggatagcacgcccaggccctgtgcaaggcctctggcacttaggagaggcttttgcccctttgtcctctgagcagaagggttggcaaagagggaaggggacaggccagttctgcacctggcctttctccagaatgaaggcctccaccacccgtccgttcccacagaaagaaaagtaaactgttttcgcggctgcgcagaaagaagaacatggttcgtgcagtgagtgctgcggaggggcgcagaggcccgcgccctggctggccctgtgcatgctgccttgcgccctgctcccaggtgctcactaacccgtaatctggctctgtgtgcagtgctgcccggcagggctgtcgtgtgcgtgttgggtgggaaggcggaggcggcgcggggcgggctggcctctgagcatctggctgcatttagcacg

SEQ ID NO: 488 - DNA, 504 bp, synthetic construct
  misc_feature 1..504: note = Synthetic
  source 1..504: mol_type = other DNA
gagcctcctgcccctcaccaggccctgttagcatcacctcgggcacctggccacagcaggggccagtcagggcaccccgggatagcacgcccaggccctgtgcaaggcctctggcacttaggagaggcttttgcccctttgtcctctgagcagaagggttggcaaagagggaaggggacaggccagttctgcacctggcctttctccagaatgaaggcctccaccacccgtccgttcccacagaaagaaaagtaaactgttttcgcggctgcgcagaaagaagaacatggttcgtgcagtgagtgctgcggaggggcgcagaggcccgcgccctggctggccctgtgcatgctgccttgcgccctgctcccaggtgctcactaacccgtaatctggctctgtgtgcatgtgctgcccggcagggctgtcgtgtgcgtgttgggtgggaaggcggaggcggcgcggggcgggctggcctctgagcatctggctgcatttagcacg

SEQ ID NO: 489 - DNA, 505 bp, synthetic construct
  misc_feature 1..505: note = Synthetic
  source 1..505: mol_type = other DNA
gagcctcctgcccctcaccaggccctgttagcatcacctcgggcacctggccacagcaggggccagtcagggcaccccgggatagcacgcccaggccctgtgcaaggcctctggcacttaggagaggcttttgcccctttgtcctctgagcagaagggttggcaaagagggaaggggacaggccagttctgcacctggcctttctccagaatgaaggcctccaccacccgtccgttcccacagaaagaaaagtaaactgttttcgcggctgcgcagaaagaagaacatggttcgtgcagtgagtgctgcggaggggcgcagaggcccgcgccctggctggccctgtgcatgctgccttgcgccctgctcccaggtgctcactaacccgtaatctgctgctctgtgtgcagtgctgcccggcagggctgtcgtgtgcgtgttgggtgggaaggcggaggcggcgcggggcgggctggcctctgagcatctggctgcatttagcacg

SEQ ID NO: 490 - DNA, 506 bp, synthetic construct
  misc_feature 1..506: note = Synthetic
  source 1..506: mol_type = other DNA
gagcctcctgcccctcaccaggccctgttagcatcacctcgggcacctggccacagcaggggccagtcagggcaccccgggatagcacgcccaggccctgtgcaaggcctctggcacttaggagaggcttttgcccctttgtcctctgagcagaagggttggcaaagagggaaggggacaggccagttctgcacctggcctttctccagaatgaaggcctccaccacccgtccgttcccacagaaagaaaagtaaactgttttcgcggctgcgcagaaagaagaacatggttcgtgcagtgagtgctgcggaggggcgcagaggcccgcgccctggctggccctgtgcatgctgccttgcgccctgctcccaggtgctcactaacccgtaatctgctgctctgtgtgcatgtgctgcccggcagggctgtcgtgtgcgtgttgggtgggaaggcggaggcggcgcggggcgggctggcctctgagcatctggctgcatttagcacg

SEQ ID NO: 491 - DNA, 501 bp, synthetic construct
  misc_feature 1..501: note = Synthetic
  source 1..501: mol_type = other DNA
gagcctcctgcccctcaccaggccctgttagcatcacctcgggcacctggccacagcaggggccagtcagggcaccccgggatagcacgcccaggccctgtgcaaggcctctggcacttaggagaggcttttgcccctttgtcctctgagcagaagggttggcaaagagggaaggggacaggccagttctgcacctggcctttctccagaatgaaggcctccacctcccgtcccaccccacagaaagaaaagtaaactgttttcgcggctgcgcagaaagaagaacatggtacgtgcagtgagtgctgcggaggggcgcagaggcccgcgccctggctggccctgtgcatgcgccttgcgccctgctcccaggtgccactaacccgtaatctggctctgtgtgcagtgctgcccggcagggctgtcgtgtgcgtgttgggtgggaaggcggaggcggcgcggggcgggctggcctctgagcatctggctgcatttagcacg

SEQ ID NO: 492 - DNA, 502 bp, synthetic construct
  misc_feature 1..502: note = Synthetic
  source 1..502: mol_type = other DNA
gagcctcctgcccctcaccaggccctgttagcatcacctcgggcacctggccacagcaggggccagtcagggcaccccgggatagcacgcccaggccctgtgcaaggcctctggcacttaggagaggcttttgcccctttgtcctctgagcagaagggttggcaaagagggaaggggacaggccagttctgcacctggcctttctccagaatgaaggcctccacctcccgtcccaccccacagaaagaaaagtaaactgttttcgcggctgcgcagaaagaagaacatggtacgtgcagtgagtgctgcggaggggcgcagaggcccgcgccctggctggccctgtgcatgcgccttgcgccctgctcccaggtgccactaacccgtaatctggctctgtgtgcatgtgctgcccggcagggctgtcgtgtgcgtgttgggtgggaaggcggaggcggcgcggggcgggctggcctctgagcatctggctgcatttagcacg

SEQ ID NO: 493 - DNA, 503 bp, synthetic construct
  misc_feature 1..503: note = Synthetic
  source 1..503: mol_type = other DNA
gagcctcctgcccctcaccaggccctgttagcatcacctcgggcacctggccacagcaggggccagtcagggcaccccgggatagcacgcccaggccctgtgcaaggcctctggcacttaggagaggcttttgcccctttgtcctctgagcagaagggttggcaaagagggaaggggacaggccagttctgcacctggcctttctccagaatgaaggcctccacctcccgtcccaccccacagaaagaaaagtaaactgttttcgcggctgcgcagaaagaagaacatggtacgtgcagtgagtgctgcggaggggcgcagaggcccgcgccctggctggccctgtgcatgcgccttgcgccctgctcccaggtgccactaacccgtaatctgctgctctgtgtgcagtgctgcccggcagggctgtcgtgtgcgtgttgggtgggaaggcggaggcggcgcggggcgggctggcctctgagcatctggctgcatttagcacg

SEQ ID NO: 494 - DNA, 504 bp, synthetic construct
  misc_feature 1..504: note = Synthetic
  source 1..504: mol_type = other DNA
gagcctcctgcccctcaccaggccctgttagcatcacctcgggcacctggccacagcaggggccagtcagggcaccccgggatagcacgcccaggccctgtgcaaggcctctggcacttaggagaggcttttgcccctttgtcctctgagcagaagggttggcaaagagggaaggggacaggccagttctgcacctggcctttctccagaatgaaggcctccacctcccgtcccaccccacagaaagaaaagtaaactgttttcgcggctgcgcagaaagaagaacatggtacgtgcagtgagtgctgcggaggggcgcagaggcccgcgccctggctggccctgtgcatgcgccttgcgccctgctcccaggtgccactaacccgtaatctgctgctctgtgtgcatgtgctgcccggcagggctgtcgtgtgcgtgttgggtgggaaggcggaggcggcgcggggcgggctggcctctgagcatctggctgcatttagcacg

SEQ ID NO: 495 - DNA, 502 bp, synthetic construct
  misc_feature 1..502: note = Synthetic
  source 1..502: mol_type = other DNA
gagcctcctgcccctcaccaggccctgttagcatcacctcgggcacctggccacagcaggggccagtcagggcaccccgggatagcacgcccaggccctgtgcaaggcctctggcacttaggagaggcttttgcccctttgtcctctgagcagaagggttggcaaagagggaaggggacaggccagttctgcacctggcctttctccagaatgaaggcctccacctcccgtcccaccccacagaaagaaaagtaaactgttttcgcggctgcgcagaaagaagaacatggtacgtgcagtgagtgctgcggaggggcgcagaggcccgcgccctggctggccctgtgcatgcgccttgcgccctgctcccaggtgctcactaacccgtaatctggctctgtgtgcagtgctgcccggcagggctgtcgtgtgcgtgttgggtgggaaggcggaggcggcgcggggcgggctggcctctgagcatctggctgcatttagcacg

SEQ ID NO: 496 - DNA, 503 bp, synthetic construct
  misc_feature 1..503: note = Synthetic
  source 1..503: mol_type = other DNA
gagcctcctgcccctcaccaggccctgttagcatcacctcgggcacctggccacagcaggggccagtcagggcaccccgggatagcacgcccaggccctgtgcaaggcctctggcacttaggagaggcttttgcccctttgtcctctgagcagaagggttggcaaagagggaaggggacaggccagttctgcacctggcctttctccagaatgaaggcctccacctcccgtcccaccccacagaaagaaaagtaaactgttttcgcggctgcgcagaaagaagaacatggtacgtgcagtgagtgctgcggaggggcgcagaggcccgcgccctggctggccctgtgcatgcgccttgcgccctgctcccaggtgctcactaacccgtaatctggctctgtgtgcatgtgctgcccggcagggctgtcgtgtgcgtgttgggtgggaaggcggaggcggcgcggggcgggctggcctctgagcatctggctgcatttagcacg

SEQ ID NO: 497 - DNA, 504 bp, synthetic construct
  misc_feature 1..504: note = Synthetic
  source 1..504: mol_type = other DNA
gagcctcctgcccctcaccaggccctgttagcatcacctcgggcacctggccacagcaggggccagtcagggcaccccgggatagcacgcccaggccctgtgcaaggcctctggcacttaggagaggcttttgcccctttgtcctctgagcagaagggttggcaaagagggaaggggacaggccagttctgcacctggcctttctccagaatgaaggcctccacctcccgtcccaccccacagaaagaaaagtaaactgttttcgcggctgcgcagaaagaagaacatggtacgtgcagtgagtgctgcggaggggcgcagaggcccgcgccctggctggccctgtgcatgcgccttgcgccctgctcccaggtgctcactaacccgtaatctgctgctctgtgtgcagtgctgcccggcagggctgtcgtgtgcgtgttgggtgggaaggcggaggcggcgcggggcgggctggcctctgagcatctggctgcatttagcacg

SEQ ID NO: 498 - DNA, 505 bp, synthetic construct
  misc_feature 1..505: note = Synthetic
  source 1..505: mol_type = other DNA
gagcctcctgcccctcaccaggccctgttagcatcacctcgggcacctggccacagcaggggccagtcagggcaccccgggatagcacgcccaggccctgtgcaaggcctctggcacttaggagaggcttttgcccctttgtcctctgagcagaagggttggcaaagagggaaggggacaggccagttctgcacctggcctttctccagaatgaaggcctccacctcccgtcccaccccacagaaagaaaagtaaactgttttcgcggctgcgcagaaagaagaacatggtacgtgcagtgagtgctgcggaggggcgcagaggcccgcgccctggctggccctgtgcatgcgccttgcgccctgctcccaggtgctcactaacccgtaatctgctgctctgtgtgcatgtgctgcccggcagggctgtcgtgtgcgtgttgggtgggaaggcggaggcggcgcggggcgggctggcctctgagcatctggctgcatttagcacg

SEQ ID NO: 499 - DNA, 502 bp, synthetic construct
  misc_feature 1..502: note = Synthetic
  source 1..502: mol_type = other DNA
gagcctcctgcccctcaccaggccctgttagcatcacctcgggcacctggccacagcaggggccagtcagggcaccccgggatagcacgcccaggccctgtgcaaggcctctggcacttaggagaggcttttgcccctttgtcctctgagcagaagggttggcaaagagggaaggggacaggccagttctgcacctggcctttctccagaatgaaggcctccacctcccgtcccaccccacagaaagaaaagtaaactgttttcgcggctgcgcagaaagaagaacatggtacgtgcagtgagtgctgcggaggggcgcagaggcccgcgccctggctggccctgtgcatgctgccttgcgccctgctcccaggtgccactaacccgtaatctggctctgtgtgcagtgctgcccggcagggctgtcgtgtgcgtgttgggtgggaaggcggaggcggcgcggggcgggctggcctctgagcatctggctgcatttagcacg

SEQ ID NO: 500 - DNA, 503 bp, synthetic construct
  misc_feature 1..503: note = Synthetic
  source 1..503: mol_type = other DNA
gagcctcctgcccctcaccaggccctgttagcatcacctcgggcacctggccacagcaggggccagtcagggcaccccgggatagcacgcccaggccctgtgcaaggcctctggcacttaggagaggcttttgcccctttgtcctctgagcagaagggttggcaaagagggaaggggacaggccagttctgcacctggcctttctccagaatgaaggcctccacctcccgtcccaccccacagaaagaaaagtaaactgttttcgcggctgcgcagaaagaagaacatggtacgtgcagtgagtgctgcggaggggcgcagaggcccgcgccctggctggccctgtgcatgctgccttgcgccctgctcccaggtgccactaacccgtaatctggctctgtgtgcatgtgctgcccggcagggctgtcgtgtgcgtgttgggtgggaaggcggaggcggcgcggggcgggctggcctctgagcatctggctgcatttagcacg

SEQ ID NO: 501 - DNA, 504 bp, synthetic construct
  misc_feature 1..504: note = Synthetic
  source 1..504: mol_type = other DNA
gagcctcctgcccctcaccaggccctgttagcatcacctcgggcacctggccacagcaggggccagtcagggcaccccgggatagcacgcccaggccctgtgcaaggcctctggcacttaggagaggcttttgcccctttgtcctctgagcagaagggttggcaaagagggaaggggacaggccagttctgcacctggcctttctccagaatgaaggcctccacctcccgtcccaccccacagaaagaaaagtaaactgttttcgcggctgcgcagaaagaagaacatggtacgtgcagtgagtgctgcggaggggcgcagaggcccgcgccctggctggccctgtgcatgctgccttgcgccctgctcccaggtgccactaacccgtaatctgctgctctgtgtgcagtgctgcccggcagggctgtcgtgtgcgtgttgggtgggaaggcggaggcggcgcggggcgggctggcctctgagcatctggctgcatttagcacg

SEQ ID NO: 502 - DNA, 505 bp, synthetic construct
  misc_feature 1..505: note = Synthetic
  source 1..505: mol_type = other DNA
gagcctcctgcccctcaccaggccctgttagcatcacctcgggcacctggccacagcaggggccagtcagggcaccccgggatagcacgcccaggccctgtgcaaggcctctggcacttaggagaggcttttgcccctttgtcctctgagcagaagggttggcaaagagggaaggggacaggccagttctgcacctggcctttctccagaatgaaggcctccacctcccgtcccaccccacagaaagaaaagtaaactgttttcgcggctgcgcagaaagaagaacatggtacgtgcagtgagtgctgcggaggggcgcagaggcccgcgccctggctggccctgtgcatgctgccttgcgccctgctcccaggtgccactaacccgtaatctgctgctctgtgtgcatgtgctgcccggcagggctgtcgtgtgcgtgttgggtgggaaggcggaggcggcgcggggcgggctggcctctgagcatctggctgcatttagcacg

SEQ ID NO: 503 - DNA, 503 bp, synthetic construct
  misc_feature 1..503: note = Synthetic
  source 1..503: mol_type = other DNA
gagcctcctgcccctcaccaggccctgttagcatcacctcgggcacctggccacagcaggggccagtcagggcaccccgggatagcacgcccaggccctgtgcaaggcctctggcacttaggagaggcttttgcccctttgtcctctgagcagaagggttggcaaagagggaaggggacaggccagttctgcacctggcctttctccagaatgaaggcctccacctcccgtcccaccccacagaaagaaaagtaaactgttttcgcggctgcgcagaaagaagaacatggtacgtgcagtgagtgctgcggaggggcgcagaggcccgcgccctggctggccctgtgcatgctgccttgcgccctgctcccaggtgctcactaacccgtaatctggctctgtgtgcagtgctgcccggcagggctgtcgtgtgcgtgttgggtgggaaggcggaggcggcgcggggcgggctggcctctgagcatctggctgcatttagcacg

SEQ ID NO: 504 - DNA, 504 bp, synthetic construct
  misc_feature 1..504: note = Synthetic
  source 1..504: mol_type = other DNA
gagcctcctgcccctcaccaggccctgttagcatcacctcgggcacctggccacagcaggggccagtcagggcaccccgggatagcacgcccaggccctgtgcaaggcctctggcacttaggagaggcttttgcccctttgtcctctgagcagaagggttggcaaagagggaaggggacaggccagttctgcacctggcctttctccagaatgaaggcctccacctcccgtcccaccccacagaaagaaaagtaaactgttttcgcggctgcgcagaaagaagaacatggtacgtgcagtgagtgctgcggaggggcgcagaggcccgcgccctggctggccctgtgcatgctgccttgcgccctgctcccaggtgctcactaacccgtaatctggctctgtgtgcatgtgctgcccggcagggctgtcgtgtgcgtgttgggtgggaaggcggaggcggcgcggggcgggctggcctctgagcatctggctgcatttagcacg

SEQ ID NO: 505 - DNA, 505 bp, synthetic construct
  misc_feature 1..505: note = Synthetic
  source 1..505: mol_type = other DNA
gagcctcctgcccctcaccaggccctgttagcatcacctcgggcacctggccacagcaggggccagtcagggcaccccgggatagcacgcccaggccctgtgcaaggcctctggcacttaggagaggcttttgcccctttgtcctctgagcagaagggttggcaaagagggaaggggacaggccagttctgcacctggcctttctccagaatgaaggcctccacctcccgtcccaccccacagaaagaaaagtaaactgttttcgcggctgcgcagaaagaagaacatggtacgtgcagtgagtgctgcggaggggcgcagaggcccgcgccctggctggccctgtgcatgctgccttgcgccctgctcccaggtgctcactaacccgtaatctgctgctctgtgtgcagtgctgcccggcagggctgtcgtgtgcgtgttgggtgggaaggcggaggcggcgcggggcgggctggcctctgagcatctggctgcatttagcacg

SEQ ID NO: 506 - DNA, 506 bp, synthetic construct
  misc_feature 1..506: note = Synthetic
  source 1..506: mol_type = other DNA
gagcctcctgcccctcaccaggccctgttagcatcacctcgggcacctggccacagcaggggccagtcagggcaccccgggatagcacgcccaggccctgtgcaaggcctctggcacttaggagaggcttttgcccctttgtcctctgagcagaagggttggcaaagagggaaggggacaggccagttctgcacctggcctttctccagaatgaaggcctccacctcccgtcccaccccacagaaagaaaagtaaactgttttcgcggctgcgcagaaagaagaacatggtacgtgcagtgagtgctgcggaggggcgcagaggcccgcgccctggctggccctgtgcatgctgccttgcgccctgctcccaggtgctcactaacccgtaatctgctgctctgtgtgcatgtgctgcccggcagggctgtcgtgtgcgtgttgggtgggaaggcggaggcggcgcggggcgggctggcctctgagcatctggctgcatttagcacg

SEQ ID NO: 507 - DNA, 501 bp, synthetic construct
  misc_feature 1..501: note = Synthetic
  source 1..501: mol_type = other DNA
gagcctcctgcccctcaccaggccctgttagcatcacctcgggcacctggccacagcaggggccagtcagggcaccccgggatagcacgcccaggccctgtgcaaggcctctggcacttaggagaggcttttgcccctttgtcctctgagcagaagggttggcaaagagggaaggggacaggccagttctgcacctggcctttctccagaatgaaggcctccacctcccgtcccaccccacagaaagaaaagtaaactgttttcgcggctgcgcagaaagaagaacatggtaagtgcagtgagtgctgcggaggggcgcagaggcccgcgccctggctggccctgtgcatgcgccttgcgccctgctcccaggtgccactaacccgtaatctggctctgtgtgcagtgctgcccggcagggctgtcgtgtgcgtgttgggtgggaaggcggaggcggcgcggggcgggctggcctctgagcatctggctgcatttagcacg

SEQ ID NO: 508 - DNA, 502 bp, synthetic construct
  misc_feature 1..502: note = Synthetic
  source 1..502: mol_type = other DNA
gagcctcctgcccctcaccaggccctgttagcatcacctcgggcacctggccacagcaggggccagtcagggcaccccgggatagcacgcccaggccctgtgcaaggcctctggcacttaggagaggcttttgcccctttgtcctctgagcagaagggttggcaaagagggaaggggacaggccagttctgcacctggcctttctccagaatgaaggcctccacctcccgtcccaccccacagaaagaaaagtaaactgttttcgcggctgcgcagaaagaagaacatggtaagtgcagtgagtgctgcggaggggcgcagaggcccgcgccctggctggccctgtgcatgcgccttgcgccctgctcccaggtgccactaacccgtaatctggctctgtgtgcatgtgctgcccggcagggctgtcgtgtgcgtgttgggtgggaaggcggaggcggcgcggggcgggctggcctctgagcatctggctgcatttagcacg

SEQ ID NO: 509 - DNA, 503 bp, synthetic construct
  misc_feature 1..503: note = Synthetic
  source 1..503: mol_type = other DNA
gagcctcctgcccctcaccaggccctgttagcatcacctcgggcacctggccacagcaggggccagtcagggcaccccgggatagcacgcccaggccctgtgcaaggcctctggcacttaggagaggcttttgcccctttgtcctctgagcagaagggttggcaaagagggaaggggacaggccagttctgcacctggcctttctccagaatgaaggcctccacctcccgtcccaccccacagaaagaaaagtaaactgttttcgcggctgcgcagaaagaagaacatggtaagtgcagtgagtgctgcggaggggcgcagaggcccgcgccctggctggccctgtgcatgcgccttgcgccctgctcccaggtgccactaacccgtaatctgctgctctgtgtgcagtgctgcccggcagggctgtcgtgtgcgtgttgggtgggaaggcggaggcggcgcggggcgggctggcctctgagcatctggctgcatttagcacg

SEQ ID NO: 510 - DNA, 504 bp, synthetic construct
  misc_feature 1..504: note = Synthetic
  source 1..504: mol_type = other DNA
gagcctcctgcccctcaccaggccctgttagcatcacctcgggcacctggccacagcaggggccagtcagggcaccccgggatagcacgcccaggccctgtgcaaggcctctggcacttaggagaggcttttgcccctttgtcctctgagcagaagggttggcaaagagggaaggggacaggccagttctgcacctggcctttctccagaatgaaggcctccacctcccgtcccaccccacagaaagaaaagtaaactgttttcgcggctgcgcagaaagaagaacatggtaagtgcagtgagtgctgcggaggggcgcagaggcccgcgccctggctggccctgtgcatgcgccttgcgccctgctcccaggtgccactaacccgtaatctgctgctctgtgtgcatgtgctgcccggcagggctgtcgtgtgcgtgttgggtgggaaggcggaggcggcgcggggcgggctggcctctgagcatctggctgcatttagcacg

SEQ ID NO: 511 - DNA, 502 bp, synthetic construct
  misc_feature 1..502: note = Synthetic
  source 1..502: mol_type = other DNA
gagcctcctgcccctcaccaggccctgttagcatcacctcgggcacctggccacagcaggggccagtcagggcaccccgggatagcacgcccaggccctgtgcaaggcctctggcacttaggagaggcttttgcccctttgtcctctgagcagaagggttggcaaagagggaaggggacaggccagttctgcacctggcctttctccagaatgaaggcctccacctcccgtcccaccccacagaaagaaaagtaaactgttttcgcggctgcgcagaaagaagaacatggtaagtgcagtgagtgctgcggaggggcgcagaggcccgcgccctggctggccctgtgcatgcgccttgcgccctgctcccaggtgctcactaacccgtaatctggctctgtgtgcagtgctgcccggcagggctgtcgtgtgcgtgttgggtgggaaggcggaggcggcgcggggcgggctggcctctgagcatctggctgcatttagcacg

SEQ ID NO: 512 - DNA, 503 bp, synthetic construct
  misc_feature 1..503: note = Synthetic
  source 1..503: mol_type = other DNA
gagcctcctgcccctcaccaggccctgttagcatcacctcgggcacctggccacagcaggggccagtcagggcaccccgggatagcacgcccaggccctgtgcaaggcctctggcacttaggagaggcttttgcccctttgtcctctgagcagaagggttggcaaagagggaaggggacaggccagttctgcacctggcctttctccagaatgaaggcctccacctcccgtcccaccccacagaaagaaaagtaaactgttttcgcggctgcgcagaaagaagaacatggtaagtgcagtgagtgctgcggaggggcgcagaggcccgcgccctggctggccctgtgcatgcgccttgcgccctgctcccaggtgctcactaacccgtaatctggctctgtgtgcatgtgctgcccggcagggctgtcgtgtgcgtgttgggtgggaaggcggaggcggcgcggggcgggctggcctctgagcatctggctgcatttagcacg

SEQ ID NO: 513 - DNA, 504 bp, synthetic construct
  misc_feature 1..504: note = Synthetic
  source 1..504: mol_type = other DNA
gagcctcctgcccctcaccaggccctgttagcatcacctcgggcacctggccacagcaggggccagtcagggcaccccgggatagcacgcccaggccctgtgcaaggcctctggcacttaggagaggcttttgcccctttgtcctctgagcagaagggttggcaaagagggaaggggacaggccagttctgcacctggcctttctccagaatgaaggcctccacctcccgtcccaccccacagaaagaaaagtaaactgttttcgcggctgcgcagaaagaagaacatggtaagtgcagtgagtgctgcggaggggcgcagaggcccgcgccctggctggccctgtgcatgcgccttgcgccctgctcccaggtgctcactaacccgtaatctgctgctctgtgtgcagtgctgcccggcagggctgtcgtgtgcgtgttgggtgggaaggcggaggcggcgcggggcgggctggcctctgagcatctggctgcatttagcacg

SEQ ID NO: 514 - DNA, 505 bp, synthetic construct
  misc_feature 1..505: note = Synthetic
  source 1..505: mol_type = other DNA
gagcctcctgcccctcaccaggccctgttagcatcacctcgggcacctggccacagcaggggccagtcagggcaccccgggatagcacgcccaggccctgtgcaaggcctctggcacttaggagaggcttttgcccctttgtcctctgagcagaagggttggcaaagagggaaggggacaggccagttctgcacctggcctttctccagaatgaaggcctccacctcccgtcccaccccacagaaagaaaagtaaactgttttcgcggctgcgcagaaagaagaacatggtaagtgcagtgagtgctgcggaggggcgcagaggcccgcgccctggctggccctgtgcatgcgccttgcgccctgctcccaggtgctcactaacccgtaatctgctgctctgtgtgcatgtgctgcccggcagggctgtcgtgtgcgtgttgggtgggaaggcggaggcggcgcggggcgggctggcctctgagcatctggctgcatttagcacg

SEQ ID NO: 515 - DNA, 502 bp, synthetic construct
  misc_feature 1..502: note = Synthetic
  source 1..502: mol_type = other DNA
gagcctcctgcccctcaccaggccctgttagcatcacctcgggcacctggccacagcaggggccagtcagggcaccccgggatagcacgcccaggccctgtgcaaggcctctggcacttaggagaggcttttgcccctttgtcctctgagcagaagggttggcaaagagggaaggggacaggccagttctgcacctggcctttctccagaatgaaggcctccacctcccgtcccaccccacagaaagaaaagtaaactgttttcgcggctgcgcagaaagaagaacatggtaagtgcagtgagtgctgcggaggggcgcagaggcccgcgccctggctggccctgtgcatgctgccttgcgccctgctcccaggtgccactaacccgtaatctggctctgtgtgcagtgctgcccggcagggctgtcgtgtgcgtgttgggtgggaaggcggaggcggcgcggggcgggctggcctctgagcatctggctgcatttagcacg

SEQ ID NO: 516 - DNA, 503 bp, synthetic construct
  misc_feature 1..503: note = Synthetic
  source 1..503: mol_type = other DNA
gagcctcctgcccctcaccaggccctgttagcatcacctcgggcacctggccacagcaggggccagtcagggcaccccgggatagcacgcccaggccctgtgcaaggcctctggcacttaggagaggcttttgcccctttgtcctctgagcagaagggttggcaaagagggaaggggacaggccagttctgcacctggcctttctccagaatgaaggcctccacctcccgtcccaccccacagaaagaaaagtaaactgttttcgcggctgcgcagaaagaagaacatggtaagtgcagtgagtgctgcggaggggcgcagaggcccgcgccctggctggccctgtgcatgctgccttgcgccctgctcccaggtgccactaacccgtaatctggctctgtgtgcatgtgctgcccggcagggctgtcgtgtgcgtgttgggtgggaaggcggaggcggcgcggggcgggctggcctctgagcatctggctgcatttagcacg

SEQ ID NO: 517 - DNA, 504 bp, synthetic construct
  misc_feature 1..504: note = Synthetic
  source 1..504: mol_type = other DNA
gagcctcctgcccctcaccaggccctgttagcatcacctcgggcacctggccacagcaggggccagtcagggcaccccgggatagcacgcccaggccctgtgcaaggcctctggcacttaggagaggcttttgcccctttgtcctctgagcagaagggttggcaaagagggaaggggacaggccagttctgcacctggcctttctccagaatgaaggcctccacctcccgtcccaccccacagaaagaaaagtaaactgttttcgcggctgcgcagaaagaagaacatggtaagtgcagtgagtgctgcggaggggcgcagaggcccgcgccctggctggccctgtgcatgctgccttgcgccctgctcccaggtgccactaacccgtaatctgctgctctgtgtgcagtgctgcccggcagggctgtcgtgtgcgtgttgggtgggaaggcggaggcggcgcggggcgggctggcctctgagcatctggctgcatttagcacg

SEQ ID NO: 518 - DNA, 505 bp, synthetic construct
  misc_feature 1..505: note = Synthetic
  source 1..505: mol_type = other DNA
gagcctcctgcccctcaccaggccctgttagcatcacctcgggcacctggccacagcaggggccagtcagggcaccccgggatagcacgcccaggccctgtgcaaggcctctggcacttaggagaggcttttgcccctttgtcctctgagcagaagggttggcaaagagggaaggggacaggccagttctgcacctggcctttctccagaatgaaggcctccacctcccgtcccaccccacagaaagaaaagtaaactgttttcgcggctgcgcagaaagaagaacatggtaagtgcagtgagtgctgcggaggggcgcagaggcccgcgccctggctggccctgtgcatgctgccttgcgccctgctcccaggtgccactaacccgtaatctgctgctctgtgtgcatgtgctgcccggcagggctgtcgtgtgcgtgttgggtgggaaggcggaggcggcgcggggcgggctggcctctgagcatctggctgcatttagcacg

SEQ ID NO: 519 - DNA, 503 bp, synthetic construct
  misc_feature 1..503: note = Synthetic
  source 1..503: mol_type = other DNA
gagcctcctgcccctcaccaggccctgttagcatcacctcgggcacctggccacagcaggggccagtcagggcaccccgggatagcacgcccaggccctgtgcaaggcctctggcacttaggagaggcttttgcccctttgtcctctgagcagaagggttggcaaagagggaaggggacaggccagttctgcacctggcctttctccagaatgaaggcctccacctcccgtcccaccccacagaaagaaaagtaaactgttttcgcggctgcgcagaaagaagaacatggtaagtgcagtgagtgctgcggaggggcgcagaggcccgcgccctggctggccctgtgcatgctgccttgcgccctgctcccaggtgctcactaacccgtaatctggctctgtgtgcagtgctgcccggcagggctgtcgtgtgcgtgttgggtgggaaggcggaggcggcgcggggcgggctggcctctgagcatctggctgcatttagcacg

SEQ ID NO: 520 - DNA, 504 bp, synthetic construct
  misc_feature 1..504: note = Synthetic
  source 1..504: mol_type = other DNA
gagcctcctgcccctcaccaggccctgttagcatcacctcgggcacctggccacagcaggggccagtcagggcaccccgggatagcacgcccaggccctgtgcaaggcctctggcacttaggagaggcttttgcccctttgtcctctgagcagaagggttggcaaagagggaaggggacaggccagttctgcacctggcctttctccagaatgaaggcctccacctcccgtcccaccccacagaaagaaaagtaaactgttttcgcggctgcgcagaaagaagaacatggtaagtgcagtgagtgctgcggaggggcgcagaggcccgcgccctggctggccctgtgcatgctgccttgcgccctgctcccaggtgctcactaacccgtaatctggctctgtgtgcatgtgctgcccggcagggctgtcgtgtgcgtgttgggtgggaaggcggaggcggcgcggggcgggctggcctctgagcatctggctgcatttagcacg

SEQ ID NO: 521 - DNA, 505 bp, synthetic construct
  misc_feature 1..505: note = Synthetic
  source 1..505: mol_type = other DNA
gagcctcctgcccctcaccaggccctgttagcatcacctcgggcacctggccacagcaggggccagtcagggcaccccgggatagcacgcccaggccctgtgcaaggcctctggcacttaggagaggcttttgcccctttgtcctctgagcagaagggttggcaaagagggaaggggacaggccagttctgcacctggcctttctccagaatgaaggcctccacctcccgtcccaccccacagaaagaaaagtaaactgttttcgcggctgcgcagaaagaagaacatggtaagtgcagtgagtgctgcggaggggcgcagaggcccgcgccctggctggccctgtgcatgctgccttgcgccctgctcccaggtgctcactaacccgtaatctgctgctctgtgtgcagtgctgcccggcagggctgtcgtgtgcgtgttgggtgggaaggcggaggcggcgcggggcgggctggcctctgagcatctggctgcatttagcacg

SEQ ID NO: 522 - DNA, 506 bp, synthetic construct
  misc_feature 1..506: note = Synthetic
  source 1..506: mol_type = other DNA
gagcctcctgcccctcaccaggccctgttagcatcacctcgggcacctggccacagcaggggccagtcagggcaccccgggatagcacgcccaggccctgtgcaaggcctctggcacttaggagaggcttttgcccctttgtcctctgagcagaagggttggcaaagagggaaggggacaggccagttctgcacctggcctttctccagaatgaaggcctccacctcccgtcccaccccacagaaagaaaagtaaactgttttcgcggctgcgcagaaagaagaacatggtaagtgcagtgagtgctgcggaggggcgcagaggcccgcgccctggctggccctgtgcatgctgccttgcgccctgctcccaggtgctcactaacccgtaatctgctgctctgtgtgcatgtgctgcccggcagggctgtcgtgtgcgtgttgggtgggaaggcggaggcggcgcggggcgggctggcctctgagcatctggctgcatttagcacg

SEQ ID NO: 523 - DNA, 501 bp, synthetic construct
  misc_feature 1..501: note = Synthetic
  source 1..501: mol_type = other DNA
gagcctcctgcccctcaccaggccctgttagcatcacctcgggcacctggccacagcaggggccagtcagggcaccccgggatagcacgcccaggccctgtgcaaggcctctggcacttaggagaggcttttgcccctttgtcctctgagcagaagggttggcaaagagggaaggggacaggccagttctgcacctggcctttctccagaatgaaggcctccacctcccgtcccaccccacagaaagaaaagtaaactgttttcgcggctgcgcagaaagaagaacatggtaggtgcagtgagtgctgcggaggggcgcagaggcccgcgccctggctggccctgtgcatgcgccttgcgccctgctcccaggtgccactaacccgtaatctggctctgtgtgcagtgctgcccggcagggctgtcgtgtgcgtgttgggtgggaaggcggaggcggcgcggggcgggctggcctctgagcatctggctgcatttagcacg

SEQ ID NO: 524 - DNA, 502 bp, synthetic construct
  misc_feature 1..502: note = Synthetic
  source 1..502: mol_type = other DNA
gagcctcctgcccctcaccaggccctgttagcatcacctcgggcacctggccacagcaggggccagtcagggcaccccgggatagcacgcccaggccctgtgcaaggcctctggcacttaggagaggcttttgcccctttgtcctctgagcagaagggttggcaaagagggaaggggacaggccagttctgcacctggcctttctccagaatgaaggcctccacctcccgtcccaccccacagaaagaaaagtaaactgttttcgcggctgcgcagaaagaagaacatggtaggtgcagtgagtgctgcggaggggcgcagaggcccgcgccctggctggccctgtgcatgcgccttgcgccctgctcccaggtgccactaacccgtaatctggctctgtgtgcatgtgctgcccggcagggctgtcgtgtgcgtgttgggtgggaaggcggaggcggcgcggggcgggctggcctctgagcatctggctgcatttagcacg

SEQ ID NO: 525 - DNA, 503 bp, synthetic construct
  misc_feature 1..503: note = Synthetic
  source 1..503: mol_type = other DNA
gagcctcctgcccctcaccaggccctgttagcatcacctcgggcacctggccacagcaggggccagtcagggcaccccgggatagcacgcccaggccctgtgcaaggcctctggcacttaggagaggcttttgcccctttgtcctctgagcagaagggttggcaaagagggaaggggacaggccagttctgcacctggcctttctccagaatgaaggcctccacctcccgtcccaccccacagaaagaaaagtaaactgttttcgcggctgcgcagaaagaagaacatggtaggtgcagtgagtgctgcggaggggcgcagaggcccgcgccctggctggccctgtgcatgcgccttgcgccctgctcccaggtgccactaacccgtaatctgctgctctgtgtgcagtgctgcccggcagggctgtcgtgtgcgtgttgggtgggaaggcggaggcggcgcggggcgggctggcctctgagcatctggctgcatttagcacg

SEQ ID NO: 526 - DNA, 504 bp, synthetic construct
  misc_feature 1..504: note = Synthetic
  source 1..504: mol_type = other DNA
gagcctcctgcccctcaccaggccctgttagcatcacctcgggcacctggccacagcaggggccagtcagggcaccccgggatagcacgcccaggccctgtgcaaggcctctggcacttaggagaggcttttgcccctttgtcctctgagcagaagggttggcaaagagggaaggggacaggccagttctgcacctggcctttctccagaatgaaggcctccacctcccgtcccaccccacagaaagaaaagtaaactgttttcgcggctgcgcagaaagaagaacatggtaggtgcagtgagtgctgcggaggggcgcagaggcccgcgccctggctggccctgtgcatgcgccttgcgccctgctcccaggtgccactaacccgtaatctgctgctctgtgtgcatgtgctgcccggcagggctgtcgtgtgcgtgttgggtgggaaggcggaggcggcgcggggcgggctggcctctgagcatctggctgcatttagcacg

SEQ ID NO: 527 - DNA, 502 bp, synthetic construct
  misc_feature 1..502: note = Synthetic
  source 1..502: mol_type = other DNA
gagcctcctgcccctcaccaggccctgttagcatcacctcgggcacctggccacagcaggggccagtcagggcaccccgggatagcacgcccaggccctgtgcaaggcctctggcacttaggagaggcttttgcccctttgtcctctgagcagaagggttggcaaagagggaaggggacaggccagttctgcacctggcctttctccagaatgaaggcctccacctcccgtcccaccccacagaaagaaaagtaaactgttttcgcggctgcgcagaaagaagaacatggtaggtgcagtgagtgctgcggaggggcgcagaggcccgcgccctggctggccctgtgcatgcgccttgcgccctgctcccaggtgctcactaacccgtaatctggctctgtgtgcagtgctgcccggcagggctgtcgtgtgcgtgttgggtgggaaggcggaggcggcgcggggcgggctggcctctgagcatctggctgcatttagcacg

SEQ ID NO: 528 - DNA, 503 bp, synthetic construct
  misc_feature 1..503: note = Synthetic
  source 1..503: mol_type = other DNA
gagcctcctgcccctcaccaggccctgttagcatcacctcgggcacctggccacagcaggggccagtcagggcaccccgggatagcacgcccaggccctgtgcaaggcctctggcacttaggagaggcttttgcccctttgtcctctgagcagaagggttggcaaagagggaaggggacaggccagttctgcacctggcctttctccagaatgaaggcctccacctcccgtcccaccccacagaaagaaaagtaaactgttttcgcggctgcgcagaaagaagaacatggtaggtgcagtgagtgctgcggaggggcgcagaggcccgcgccctggctggccctgtgcatgcgccttgcgccctgctcccaggtgctcactaacccgtaatctggctctgtgtgcatgtgctgcccggcagggctgtcgtgtgcgtgttgggtgggaaggcggaggcggcgcggggcgggctggcctctgagcatctggctgcatttagcacg

SEQ ID NO: 529 - DNA, 504 bp, synthetic construct
  misc_feature 1..504: note = Synthetic
  source 1..504: mol_type = other DNA
gagcctcctgcccctcaccaggccctgttagcatcacctcgggcacctggccacagcaggggccagtcagggcaccccgggatagcacgcccaggccctgtgcaaggcctctggcacttaggagaggcttttgcccctttgtcctctgagcagaagggttggcaaagagggaaggggacaggccagttctgcacctggcctttctccagaatgaaggcctccacctcccgtcccaccccacagaaagaaaagtaaactgttttcgcggctgcgcagaaagaagaacatggtaggtgcagtgagtgctgcggaggggcgcagaggcccgcgccctggctggccctgtgcatgcgccttgcgccctgctcccaggtgctcactaacccgtaatctgctgctctgtgtgcagtgctgcccggcagggctgtcgtgtgcgtgttgggtgggaaggcggaggcggcgcggggcgggctggcctctgagcatctggctgcatttagcacg

SEQ ID NO: 530 - DNA, 505 bp, synthetic construct
  misc_feature 1..505: note = Synthetic
  source 1..505: mol_type = other DNA
gagcctcctgcccctcaccaggccctgttagcatcacctcgggcacctggccacagcaggggccagtcagggcaccccgggatagcacgcccaggccctgtgcaaggcctctggcacttaggagaggcttttgcccctttgtcctctgagcagaagggttggcaaagagggaaggggacaggccagttctgcacctggcctttctccagaatgaaggcctccacctcccgtcccaccccacagaaagaaaagtaaactgttttcgcggctgcgcagaaagaagaacatggtaggtgcagtgagtgctgcggaggggcgcagaggcccgcgccctggctggccctgtgcatgcgccttgcgccctgctcccaggtgctcactaacccgtaatctgctgctctgtgtgcatgtgctgcccggcagggctgtcgtgtgcgtgttgggtgggaaggcggaggcggcgcggggcgggctggcctctgagcatctggctgcatttagcacg

SEQ ID NO: 531 - DNA, 502 bp, synthetic construct
  misc_feature 1..502: note = Synthetic
  source 1..502: mol_type = other DNA
gagcctcctgcccctcaccaggccctgttagcatcacctcgggcacctggccacagcaggggccagtcagggcaccccgggatagcacgcccaggccctgtgcaaggcctctggcacttaggagaggcttttgcccctttgtcctctgagcagaagggttggcaaagagggaaggggacaggccagttctgcacctggcctttctccagaatgaaggcctccacctcccgtcccaccccacagaaagaaaagtaaactgttttcgcggctgcgcagaaagaagaacatggtaggtgcagtgagtgctgcggaggggcgcagaggcccgcgccctggctggccctgtgcatgctgccttgcgccctgctcccaggtgccactaacccgtaatctggctctgtgtgcagtgctgcccggcagggctgtcgtgtgcgtgttgggtgggaaggcggaggcggcgcggggcgggctggcctctgagcatctggctgcatttagcacg

SEQ ID NO: 532 - DNA, 503 bp, synthetic construct
  misc_feature 1..503: note = Synthetic
  source 1..503: mol_type = other DNA
gagcctcctgcccctcaccaggccctgttagcatcacctcgggcacctggccacagcaggggccagtcagggcaccccgggatagcacgcccaggccctgtgcaaggcctctggcacttaggagaggcttttgcccctttgtcctctgagcagaagggttggcaaagagggaaggggacaggccagttctgcacctggcctttctccagaatgaaggcctccacctcccgtcccaccccacagaaagaaaagtaaactgttttcgcggctgcgcagaaagaagaacatggtaggtgcagtgagtgctgcggaggggcgcagaggcccgcgccctggctggccctgtgcatgctgccttgcgccctgctcccaggtgccactaacccgtaatctggctctgtgtgcatgtgctgcccggcagggctgtcgtgtgcgtgttgggtgggaaggcggaggcggcgcggggcgggctggcctctgagcatctggctgcatttagcacg

SEQ ID NO: 533 - DNA, 504 bp, synthetic construct
  misc_feature 1..504: note = Synthetic
  source 1..504: mol_type = other DNA
gagcctcctgcccctcaccaggccctgttagcatcacctcgggcacctggccacagcaggggccagtcagggcaccccgggatagcacgcccaggccctgtgcaaggcctctggcacttaggagaggcttttgcccctttgtcctctgagcagaagggttggcaaagagggaaggggacaggccagttctgcacctggcctttctccagaatgaaggcctccacctcccgtcccaccccacagaaagaaaagtaaactgttttcgcggctgcgcagaaagaagaacatggtaggtgcagtgagtgctgcggaggggcgcagaggcccgcgccctggctggccctgtgcatgctgccttgcgccctgctcccaggtgccactaacccgtaatctgctgctctgtgtgcagtgctgcccggcagggctgtcgtgtgcgtgttgggtgggaaggcggaggcggcgcggggcgggctggcctctgagcatctggctgcatttagcacg

SEQ ID NO: 534 - DNA, 505 bp, synthetic construct
  misc_feature 1..505: note = Synthetic
  source 1..505: mol_type = other DNA
gagcctcctgcccctcaccaggccctgttagcatcacctcgggcacctggccacagcaggggccagtcagggcaccccgggatagcacgcccaggccctgtgcaaggcctctggcacttaggagaggcttttgcccctttgtcctctgagcagaagggttggcaaagagggaaggggacaggccagttctgcacctggcctttctccagaatgaaggcctccacctcccgtcccaccccacagaaagaaaagtaaactgttttcgcggctgcgcagaaagaagaacatggtaggtgcagtgagtgctgcggaggggcgcagaggcccgcgccctggctggccctgtgcatgctgccttgcgccctgctcccaggtgccactaacccgtaatctgctgctctgtgtgcatgtgctgcccggcagggctgtcgtgtgcgtgttgggtgggaaggcggaggcggcgcggggcgggctggcctctgagcatctggctgcatttagcacg

SEQ ID NO: 535 - DNA, 503 bp, synthetic construct
  misc_feature 1..503: note = Synthetic
  source 1..503: mol_type = other DNA
gagcctcctgcccctcaccaggccctgttagcatcacctcgggcacctggccacagcaggggccagtcagggcaccccgggatagcacgcccaggccctgtgcaaggcctctggcacttaggagaggcttttgcccctttgtcctctgagcagaagggttggcaaagagggaaggggacaggccagttctgcacctggcctttctccagaatgaaggcctccacctcccgtcccaccccacagaaagaaaagtaaactgttttcgcggctgcgcagaaagaagaacatggtaggtgcagtgagtgctgcggaggggcgcagaggcccgcgccctggctggccctgtgcatgctgccttgcgccctgctcccaggtgctcactaacccgtaatctggctctgtgtgcagtgctgcccggcagggctgtcgtgtgcgtgttgggtgggaaggcggaggcggcgcggggcgggctggcctctgagcatctggctgcatttagcacg

SEQ ID NO: 536 - DNA, 504 bp, synthetic construct
  misc_feature 1..504: note = Synthetic
  source 1..504: mol_type = other DNA
gagcctcctgcccctcaccaggccctgttagcatcacctcgggcacctggccacagcaggggccagtcagggcaccccgggatagcacgcccaggccctgtgcaaggcctctggcacttaggagaggcttttgcccctttgtcctctgagcagaagggttggcaaagagggaaggggacaggccagttctgcacctggcctttctccagaatgaaggcctccacctcccgtcccaccccacagaaagaaaagtaaactgttttcgcggctgcgcagaaagaagaacatggtaggtgcagtgagtgctgcggaggggcgcagaggcccgcgccctggctggccctgtgcatgctgccttgcgccctgctcccaggtgctcactaacccgtaatctggctctgtgtgcatgtgctgcccggcagggctgtcgtgtgcgtgttgggtgggaaggcggaggcggcgcggggcgggctggcctctgagcatctggctgcatttagcacg

SEQ ID NO: 537 - DNA, 505 bp, synthetic construct
  misc_feature 1..505: note = Synthetic
  source 1..505: mol_type = other DNA
gagcctcctgcccctcaccaggccctgttagcatcacctcgggcacctggccacagcaggggccagtcagggcaccccgggatagcacgcccaggccctgtgcaaggcctctggcacttaggagaggcttttgcccctttgtcctctgagcagaagggttggcaaagagggaaggggacaggccagttctgcacctggcctttctccagaatgaaggcctccacctcccgtcccaccccacagaaagaaaagtaaactgttttcgcggctgcgcagaaagaagaacatggtaggtgcagtgagtgctgcggaggggcgcagaggcccgcgccctggctggccctgtgcatgctgccttgcgccctgctcccaggtgctcactaacccgtaatctgctgctctgtgtgcagtgctgcccggcagggctgtcgtgtgcgtgttgggtgggaaggcggaggcggcgcggggcgggctggcctctgagcatctggctgcatttagcacg

SEQ ID NO: 538 - DNA, 506 bp, synthetic construct
  misc_feature 1..506: note = Synthetic
  source 1..506: mol_type = other DNA
gagcctcctgcccctcaccaggccctgttagcatcacctcgggcacctggccacagcaggggccagtcagggcaccccgggatagcacgcccaggccctgtgcaaggcctctggcacttaggagaggcttttgcccctttgtcctctgagcagaagggttggcaaagagggaaggggacaggccagttctgcacctggcctttctccagaatgaaggcctccacctcccgtcccaccccacagaaagaaaagtaaactgttttcgcggctgcgcagaaagaagaacatggtaggtgcagtgagtgctgcggaggggcgcagaggcccgcgccctggctggccctgtgcatgctgccttgcgccctgctcccaggtgctcactaacccgtaatctgctgctctgtgtgcatgtgctgcccggcagggctgtcgtgtgcgtgttgggtgggaaggcggaggcggcgcggggcgggctggcctctgagcatctggctgcatttagcacg

SEQ ID NO: 539 - DNA, 501 bp, synthetic construct
  misc_feature 1..501: note = Synthetic
  source 1..501: mol_type = other DNA
gagcctcctgcccctcaccaggccctgttagcatcacctcgggcacctggccacagcaggggccagtcagggcaccccgggatagcacgcccaggccctgtgcaaggcctctggcacttaggagaggcttttgcccctttgtcctctgagcagaagggttggcaaagagggaaggggacaggccagttctgcacctggcctttctccagaatgaaggcctccacctcccgtcccaccccacagaaagaaaagtaaactgttttcgcggctgcgcagaaagaagaacatggtatgtgcagtgagtgctgcggaggggcgcagaggcccgcgccctggctggccctgtgcatgcgccttgcgccctgctcccaggtgccactaacccgtaatctggctctgtgtgcagtgctgcccggcagggctgtcgtgtgcgtgttgggtgggaaggcggaggcggcgcggggcgggctggcctctgagcatctggctgcatttagcacg

SEQ ID NO: 540 - DNA, 502 bp, synthetic construct
  misc_feature 1..502: note = Synthetic
  source 1..502: mol_type = other DNA
gagcctcctgcccctcaccaggccctgttagcatcacctcgggcacctggccacagcaggggccagtcagggcaccccgggatagcacgcccaggccctgtgcaaggcctctggcacttaggagaggcttttgcccctttgtcctctgagcagaagggttggcaaagagggaaggggacaggccagttctgcacctggcctttctccagaatgaaggcctccacctcccgtcccaccccacagaaagaaaagtaaactgttttcgcggctgcgcagaaagaagaacatggtatgtgcagtgagtgctgcggaggggcgcagaggcccgcgccctggctggccctgtgcatgcgccttgcgccctgctcccaggtgccactaacccgtaatctggctctgtgtgcatgtgctgcccggcagggctgtcgtgtgcgtgttgggtgggaaggcggaggcggcgcggggcgggctggcctctgagcatctggctgcatttagcacg

SEQ ID NO: 541 - DNA, 503 bp, synthetic construct
  misc_feature 1..503: note = Synthetic
  source 1..503: mol_type = other DNA
gagcctcctgcccctcaccaggccctgttagcatcacctcgggcacctggccacagcaggggccagtcagggcaccccgggatagcacgcccaggccctgtgcaaggcctctggcacttaggagaggcttttgcccctttgtcctctgagcagaagggttggcaaagagggaaggggacaggccagttctgcacctggcctttctccagaatgaaggcctccacctcccgtcccaccccacagaaagaaaagtaaactgttttcgcggctgcgcagaaagaagaacatggtatgtgcagtgagtgctgcggaggggcgcagaggcccgcgccctggctggccctgtgcatgcgccttgcgccctgctcccaggtgccactaacccgtaatctgctgctctgtgtgcagtgctgcccggcagggctgtcgtgtgcgtgttgggtgggaaggcggaggcggcgcggggcgggctggcctctgagcatctggctgcatttagcacg

SEQ ID NO: 542 - DNA, 504 bp, synthetic construct
  misc_feature 1..504: note = Synthetic
  source 1..504: mol_type = other DNA
gagcctcctgcccctcaccaggccctgttagcatcacctcgggcacctggccacagcaggggccagtcagggcaccccgggatagcacgcccaggccctgtgcaaggcctctggcacttaggagaggcttttgcccctttgtcctctgagcagaagggttggcaaagagggaaggggacaggccagttctgcacctggcctttctccagaatgaaggcctccacctcccgtcccaccccacagaaagaaaagtaaactgttttcgcggctgcgcagaaagaagaacatggtatgtgcagtgagtgctgcggaggggcgcagaggcccgcgccctggctggccctgtgcatgcgccttgcgccctgctcccaggtgccactaacccgtaatctgctgctctgtgtgcatgtgctgcccggcagggctgtcgtgtgcgtgttgggtgggaaggcggaggcggcgcggggcgggctggcctctgagcatctggctgcatttagcacg

SEQ ID NO: 543 - DNA, 502 bp, synthetic construct
  misc_feature 1..502: note = Synthetic
  source 1..502: mol_type = other DNA
gagcctcctgcccctcaccaggccctgttagcatcacctcgggcacctggccacagcaggggccagtcagggcaccccgggatagcacgcccaggccctgtgcaaggcctctggcacttaggagaggcttttgcccctttgtcctctgagcagaagggttggcaaagagggaaggggacaggccagttctgcacctggcctttctccagaatgaaggcctccacctcccgtcccaccccacagaaagaaaagtaaactgttttcgcggctgcgcagaaagaagaacatggtatgtgcagtgagtgctgcggaggggcgcagaggcccgcgccctggctggccctgtgcatgcgccttgcgccctgctcccaggtgctcactaacccgtaatctggctctgtgtgcagtgctgcccggcagggctgtcgtgtgcgtgttgggtgggaaggcggaggcggcgcggggcgggctggcctctgagcatctggctgcatttagcacg

SEQ ID NO: 544 - DNA, 503 bp, synthetic construct
  misc_feature 1..503: note = Synthetic
  source 1..503: mol_type = other DNA
gagcctcctgcccctcaccaggccctgttagcatcacctcgggcacctggccacagcaggggccagtcagggcaccccgggatagcacgcccaggccctgtgcaaggcctctggcacttaggagaggcttttgcccctttgtcctctgagcagaagggttggcaaagagggaaggggacaggccagttctgcacctggcctttctccagaatgaaggcctccacctcccgtcccaccccacagaaagaaaagtaaactgttttcgcggctgcgcagaaagaagaacatggtatgtgcagtgagtgctgcggaggggcgcagaggcccgcgccctggctggccctgtgcatgcgccttgcgccctgctcccaggtgctcactaacccgtaatctggctctgtgtgcatgtgctgcccggcagggctgtcgtgtgcgtgttgggtgggaaggcggaggcggcgcggggcgggctggcctctgagcatctggctgcatttagcacg

SEQ ID NO: 545 - DNA, 504 bp, synthetic construct
  misc_feature 1..504: note = Synthetic
  source 1..504: mol_type = other DNA
gagcctcctgcccctcaccaggccctgttagcatcacctcgggcacctggccacagcaggggccagtcagggcaccccgggatagcacgcccaggccctgtgcaaggcctctggcacttaggagaggcttttgcccctttgtcctctgagcagaagggttggcaaagagggaaggggacaggccagttctgcacctggcctttctccagaatgaaggcctccacctcccgtcccaccccacagaaagaaaagtaaactgttttcgcggctgcgcagaaagaagaacatggtatgtgcagtgagtgctgcggaggggcgcagaggcccgcgccctggctggccctgtgcatgcgccttgcgccctgctcccaggtgctcactaacccgtaatctgctgctctgtgtgcagtgctgcccggcagggctgtcgtgtgcgtgttgggtgggaaggcggaggcggcgcggggcgggctggcctctgagcatctggctgcatttagcacg

SEQ ID NO: 546 - DNA, 505 bp, synthetic construct
  misc_feature 1..505: note = Synthetic
  source 1..505: mol_type = other DNA
gagcctcctgcccctcaccaggccctgttagcatcacctcgggcacctggccacagcaggggccagtcagggcaccccgggatagcacgcccaggccctgtgcaaggcctctggcacttaggagaggcttttgcccctttgtcctctgagcagaagggttggcaaagagggaaggggacaggccagttctgcacctggcctttctccagaatgaaggcctccacctcccgtcccaccccacagaaagaaaagtaaactgttttcgcggctgcgcagaaagaagaacatggtatgtgcagtgagtgctgcggaggggcgcagaggcccgcgccctggctggccctgtgcatgcgccttgcgccctgctcccaggtgctcactaacccgtaatctgctgctctgtgtgcatgtgctgcccggcagggctgtcgtgtgcgtgttgggtgggaaggcggaggcggcgcggggcgggctggcctctgagcatctggctgcatttagcacg

SEQ ID NO: 547 - DNA, 502 bp, synthetic construct
  misc_feature 1..502: note = Synthetic
  source 1..502: mol_type = other DNA
gagcctcctgcccctcaccaggccctgttagcatcacctcgggcacctggccacagcaggggccagtcagggcaccccgggatagcacgcccaggccctgtgcaaggcctctggcacttaggagaggcttttgcccctttgtcctctgagcagaagggttggcaaagagggaaggggacaggccagttctgcacctggcctttctccagaatgaaggcctccacctcccgtcccaccccacagaaagaaaagtaaactgttttcgcggctgcgcagaaagaagaacatggtatgtgcagtgagtgctgcggaggggcgcagaggcccgcgccctggctggccctgtgcatgctgccttgcgccctgctcccaggtgccactaacccgtaatctggctctgtgtgcagtgctgcccggcagggctgtcgtgtgcgtgttgggtgggaaggcggaggcggcgcggggcgggctggcctctgagcatctggctgcatttagcacg

SEQ ID NO: 548 - DNA, 503 bp, synthetic construct
  misc_feature 1..503: note = Synthetic
  source 1..503: mol_type = other DNA
gagcctcctgcccctcaccaggccctgttagcatcacctcgggcacctggccacagcaggggccagtcagggcaccccgggatagcacgcccaggccctgtgcaaggcctctggcacttaggagaggcttttgcccctttgtcctctgagcagaagggttggcaaagagggaaggggacaggccagttctgcacctggcctttctccagaatgaaggcctccacctcccgtcccaccccacagaaagaaaagtaaactgttttcgcggctgcgcagaaagaagaacatggtatgtgcagtgagtgctgcggaggggcgcagaggcccgcgccctggctggccctgtgcatgctgccttgcgccctgctcccaggtgccactaacccgtaatctggctctgtgtgcatgtgctgcccggcagggctgtcgtgtgcgtgttgggtgggaaggcggaggcggcgcggggcgggctggcctctgagcatctggctgcatttagcacg

SEQ ID NO: 549 - DNA, 504 bp, synthetic construct
  misc_feature 1..504: note = Synthetic
  source 1..504: mol_type = other DNA
gagcctcctgcccctcaccaggccctgttagcatcacctcgggcacctggccacagcaggggccagtcagggcaccccgggatagcacgcccaggccctgtgcaaggcctctggcacttaggagaggcttttgcccctttgtcctctgagcagaagggttggcaaagagggaaggggacaggccagttctgcacctggcctttctccagaatgaaggcctccacctcccgtcccaccccacagaaagaaaagtaaactgttttcgcggctgcgcagaaagaagaacatggtatgtgcagtgagtgctgcggaggggcgcagaggcccgcgccctggctggccctgtgcatgctgccttgcgccctgctcccaggtgccactaacccgtaatctgctgctctgtgtgcagtgctgcccggcagggctgtcgtgtgcgtgttgggtgggaaggcggaggcggcgcggggcgggctggcctctgagcatctggctgcatttagcacg

SEQ ID NO: 550 - DNA, 505 bp, synthetic construct
  misc_feature 1..505: note = Synthetic
  source 1..505: mol_type = other DNA
gagcctcctgcccctcaccaggccctgttagcatcacctcgggcacctggccacagcaggggccagtcagggcaccccgggatagcacgcccaggccctgtgcaaggcctctggcacttaggagaggcttttgcccctttgtcctctgagcagaagggttggcaaagagggaaggggacaggccagttctgcacctggcctttctccagaatgaaggcctccacctcccgtcccaccccacagaaagaaaagtaaactgttttcgcggctgcgcagaaagaagaacatggtatgtgcagtgagtgctgcggaggggcgcagaggcccgcgccctggctggccctgtgcatgctgccttgcgccctgctcccaggtgccactaacccgtaatctgctgctctgtgtgcatgtgctgcccggcagggctgtcgtgtgcgtgttgggtgggaaggcggaggcggcgcggggcgggctggcctctgagcatctggctgcatttagcacg

SEQ ID NO: 551 - DNA, 503 bp, synthetic construct
  misc_feature 1..503: note = Synthetic
  source 1..503: mol_type = other DNA
gagcctcctgcccctcaccaggccctgttagcatcacctcgggcacctggccacagcaggggccagtcagggcaccccgggatagcacgcccaggccctgtgcaaggcctctggcacttaggagaggcttttgcccctttgtcctctgagcagaagggttggcaaagagggaaggggacaggccagttctgcacctggcctttctccagaatgaaggcctccacctcccgtcccaccccacagaaagaaaagtaaactgttttcgcggctgcgcagaaagaagaacatggtatgtgcagtgagtgctgcggaggggcgcagaggcccgcgccctggctggccctgtgcatgctgccttgcgccctgctcccaggtgctcactaacccgtaatctggctctgtgtgcagtgctgcccggcagggctgtcgtgtgcgtgttgggtgggaaggcggaggcggcgcggggcgggctggcctctgagcatctggctgcatttagcacg

SEQ ID NO: 552 - DNA, 504 bp, synthetic construct
  misc_feature 1..504: note = Synthetic
  source 1..504: mol_type = other DNA
gagcctcctgcccctcaccaggccctgttagcatcacctcgggcacctggccacagcaggggccagtcagggcaccccgggatagcacgcccaggccctgtgcaaggcctctggcacttaggagaggcttttgcccctttgtcctctgagcagaagggttggcaaagagggaaggggacaggccagttctgcacctggcctttctccagaatgaaggcctccacctcccgtcccaccccacagaaagaaaagtaaactgttttcgcggctgcgcagaaagaagaacatggtatgtgcagtgagtgctgcggaggggcgcagaggcccgcgccctggctggccctgtgcatgctgccttgcgccctgctcccaggtgctcactaacccgtaatctggctctgtgtgcatgtgctgcccggcagggctgtcgtgtgcgtgttgggtgggaaggcggaggcggcgcggggcgggctggcctctgagcatctggctgcatttagcacg

SEQ ID NO: 553 - DNA, 505 bp, synthetic construct
  misc_feature 1..505: note = Synthetic
  source 1..505: mol_type = other DNA
gagcctcctgcccctcaccaggccctgttagcatcacctcgggcacctggccacagcaggggccagtcagggcaccccgggatagcacgcccaggccctgtgcaaggcctctggcacttaggagaggcttttgcccctttgtcctctgagcagaagggttggcaaagagggaaggggacaggccagttctgcacctggcctttctccagaatgaaggcctccacctcccgtcccaccccacagaaagaaaagtaaactgttttcgcggctgcgcagaaagaagaacatggtatgtgcagtgagtgctgcggaggggcgcagaggcccgcgccctggctggccctgtgcatgctgccttgcgccctgctcccaggtgctcactaacccgtaatctgctgctctgtgtgcagtgctgcccggcagggctgtcgtgtgcgtgttgggtgggaaggcggaggcggcgcggggcgggctggcctctgagcatctggctgcatttagcacg

SEQ ID NO: 554 - DNA, 506 bp, synthetic construct
  misc_feature 1..506: note = Synthetic
  source 1..506: mol_type = other DNA
gagcctcctgcccctcaccaggccctgttagcatcacctcgggcacctggccacagcaggggccagtcagggcaccccgggatagcacgcccaggccctgtgcaaggcctctggcacttaggagaggcttttgcccctttgtcctctgagcagaagggttggcaaagagggaaggggacaggccagttctgcacctggcctttctccagaatgaaggcctccacctcccgtcccaccccacagaaagaaaagtaaactgttttcgcggctgcgcagaaagaagaacatggtatgtgcagtgagtgctgcggaggggcgcagaggcccgcgccctggctggccctgtgcatgctgccttgcgccctgctcccaggtgctcactaacccgtaatctgctgctctgtgtgcatgtgctgcccggcagggctgtcgtgtgcgtgttgggtgggaaggcggaggcggcgcggggcgggctggcctctgagcatctggctgcatttagcacg

SEQ ID NO: 555 - DNA, 501 bp, synthetic construct
  misc_feature 1..501: note = Synthetic
  source 1..501: mol_type = other DNA
gagcctcctgcccctcaccaggccctgttagcatcacctcgggcacctggccacagcaggggccagtcagggcaccccgggatagcacgcccaggccctgtgcaaggcctctggcacttaggagaggcttttgcccctttgtcctctgagcagaagggttggcaaagagggaaggggacaggccagttctgcacctggcctttctccagaatgaaggcctccacctcccgtcccaccccacagaaagaaaagtaaactgttttcgcggctgcgcagaaagaagaacatggtacgagcagtgagtgctgcggaggggcgcagaggcccgcgccctggctggccctgtgcatgcgccttgcgccctgctcccaggtgccactaacccgtaatctggctctgtgtgcagtgctgcccggcagggctgtcgtgtgcgtgttgggtgggaaggcggaggcggcgcggggcgggctggcctctgagcatctggctgcatttagcacg

SEQ ID NO: 556 - DNA, 502 bp, synthetic construct
  misc_feature 1..502: note = Synthetic
  source 1..502: mol_type = other DNA
gagcctcctgcccctcaccaggccctgttagcatcacctcgggcacctggccacagcaggggccagtcagggcaccccgggatagcacgcccaggccctgtgcaaggcctctggcacttaggagaggcttttgcccctttgtcctctgagcagaagggttggcaaagagggaaggggacaggccagttctgcacctggcctttctccagaatgaaggcctccacctcccgtcccaccccacagaaagaaaagtaaactgttttcgcggctgcgcagaaagaagaacatggtacgagcagtgagtgctgcggaggggcgcagaggcccgcgccctggctggccctgtgcatgcgccttgcgccctgctcccaggtgccactaacccgtaatctggctctgtgtgcatgtgctgcccggcagggctgtcgtgtgcgtgttgggtgggaaggcggaggcggcgcggggcgggctggcctctgagcatctggctgcatttagcacg

SEQ ID NO: 557 - DNA, 503 bp, synthetic construct
  misc_feature 1..503: note = Synthetic
  source 1..503: mol_type = other DNA
gagcctcctgcccctcaccaggccctgttagcatcacctcgggcacctggccacagcaggggccagtcagggcaccccgggatagcacgcccaggccctgtgcaaggcctctggcacttaggagaggcttttgcccctttgtcctctgagcagaagggttggcaaagagggaaggggacaggccagttctgcacctggcctttctccagaatgaaggcctccacctcccgtcccaccccacagaaagaaaagtaaactgttttcgcggctgcgcagaaagaagaacatggtacgagcagtgagtgctgcggaggggcgcagaggcccgcgccctggctggccctgtgcatgcgccttgcgccctgctcccaggtgccactaacccgtaatctgctgctctgtgtgcagtgctgcccggcagggctgtcgtgtgcgtgttgggtgggaaggcggaggcggcgcggggcgggctggcctctgagcatctggctgcatttagcacg

SEQ ID NO: 558 - DNA, 504 bp, synthetic construct
  misc_feature 1..504: note = Synthetic
  source 1..504: mol_type = other DNA
gagcctcctgcccctcaccaggccctgttagcatcacctcgggcacctggccacagcaggggccagtcagggcaccccgggatagcacgcccaggccctgtgcaaggcctctggcacttaggagaggcttttgcccctttgtcctctgagcagaagggttggcaaagagggaaggggacaggccagttctgcacctggcctttctccagaatgaaggcctccacctcccgtcccaccccacagaaagaaaagtaaactgttttcgcggctgcgcagaaagaagaacatggtacgagcagtgagtgctgcggaggggcgcagaggcccgcgccctggctggccctgtgcatgcgccttgcgccctgctcccaggtgccactaacccgtaatctgctgctctgtgtgcatgtgctgcccggcagggctgtcgtgtgcgtgttgggtgggaaggcggaggcggcgcggggcgggctggcctctgagcatctggctgcatttagcacg

SEQ ID NO: 559 - DNA, 502 bp, synthetic construct
  misc_feature 1..502: note = Synthetic
  source 1..502: mol_type = other DNA
gagcctcctgcccctcaccaggccctgttagcatcacctcgggcacctggccacagcaggggccagtcagggcaccccgggatagcacgcccaggccctgtgcaaggcctctggcacttaggagaggcttttgcccctttgtcctctgagcagaagggttggcaaagagggaaggggacaggccagttctgcacctggcctttctccagaatgaaggcctccacctcccgtcccaccccacagaaagaaaagtaaactgttttcgcggctgcgcagaaagaagaacatggtacgagcagtgagtgctgcggaggggcgcagaggcccgcgccctggctggccctgtgcatgcgccttgcgccctgctcccaggtgctcactaacccgtaatctggctctgtgtgcagtgctgcccggcagggctgtcgtgtgcgtgttgggtgggaaggcggaggcggcgcggggcgggctggcctctgagcatctggctgcatttagcacg

SEQ ID NO: 560 - DNA, 503 bp, synthetic construct
  misc_feature 1..503: note = Synthetic
  source 1..503: mol_type = other DNA
gagcctcctgcccctcaccaggccctgttagcatcacctcgggcacctggccacagcaggggccagtcagggcaccccgggatagcacgcccaggccctgtgcaaggcctctggcacttaggagaggcttttgcccctttgtcctctgagcagaagggttggcaaagagggaaggggacaggccagttctgcacctggcctttctccagaatgaaggcctccacctcccgtcccaccccacagaaagaaaagtaaactgttttcgcggctgcgcagaaagaagaacatggtacgagcagtgagtgctgcggaggggcgcagaggcccgcgccctggctggccctgtgcatgcgccttgcgccctgctcccaggtgctcactaacccgtaatctggctctgtgtgcatgtgctgcccggcagggctgtcgtgtgcgtgttgggtgggaaggcggaggcggcgcggggcgggctggcctctgagcatctggctgcatttagcacg

SEQ ID NO: 561 - DNA, 504 bp, synthetic construct
  misc_feature 1..504: note = Synthetic
  source 1..504: mol_type = other DNA
gagcctcctgcccctcaccaggccctgttagcatcacctcgggcacctggccacagcaggggccagtcagggcaccccgggatagcacgcccaggccctgtgcaaggcctctggcacttaggagaggcttttgcccctttgtcctctgagcagaagggttggcaaagagggaaggggacaggccagttctgcacctggcctttctccagaatgaaggcctccacctcccgtcccaccccacagaaagaaaagtaaactgttttcgcggctgcgcagaaagaagaacatggtacgagcagtgagtgctgcggaggggcgcagaggcccgcgccctggctggccctgtgcatgcgccttgcgccctgctcccaggtgctcactaacccgtaatctgctgctctgtgtgcagtgctgcccggcagggctgtcgtgtgcgtgttgggtgggaaggcggaggcggcgcggggcgggctggcctctgagcatctggctgcatttagcacg

SEQ ID NO: 562 - DNA, 505 bp, synthetic construct
  misc_feature 1..505: note = Synthetic
  source 1..505: mol_type = other DNA
gagcctcctgcccctcaccaggccctgttagcatcacctcgggcacctggccacagcaggggccagtcagggcaccccgggatagcacgcccaggccctgtgcaaggcctctggcacttaggagaggcttttgcccctttgtcctctgagcagaagggttggcaaagagggaaggggacaggccagttctgcacctggcctttctccagaatgaaggcctccacctcccgtcccaccccacagaaagaaaagtaaactgttttcgcggctgcgcagaaagaagaacatggtacgagcagtgagtgctgcggaggggcgcagaggcccgcgccctggctggccctgtgcatgcgccttgcgccctgctcccaggtgctcactaacccgtaatctgctgctctgtgtgcatgtgctgcccggcagggctgtcgtgtgcgtgttgggtgggaaggcggaggcggcgcggggcgggctggcctctgagcatctggctgcatttagcacg

SEQ ID NO: 563 - DNA, 502 bp, synthetic construct
  misc_feature 1..502: note = Synthetic
  source 1..502: mol_type = other DNA
gagcctcctgcccctcaccaggccctgttagcatcacctcgggcacctggccacagcaggggccagtcagggcaccccgggatagcacgcccaggccctgtgcaaggcctctggcacttaggagaggcttttgcccctttgtcctctgagcagaagggttggcaaagagggaaggggacaggccagttctgcacctggcctttctccagaatgaaggcctccacctcccgtcccaccccacagaaagaaaagtaaactgttttcgcggctgcgcagaaagaagaacatggtacgagcagtgagtgctgcggaggggcgcagaggcccgcgccctggctggccctgtgcatgctgccttgcgccctgctcccaggtgccactaacccgtaatctggctctgtgtgcagtgctgcccggcagggctgtcgtgtgcgtgttgggtgggaaggcggaggcggcgcggggcgggctggcctctgagcatctggctgcatttagcacg

SEQ ID NO: 564 - DNA, 503 bp, synthetic construct
  misc_feature 1..503: note = Synthetic
  source 1..503: mol_type = other DNA
gagcctcctgcccctcaccaggccctgttagcatcacctcgggcacctggccacagcaggggccagtcagggcaccccgggatagcacgcccaggccctgtgcaaggcctctggcacttaggagaggcttttgcccctttgtcctctgagcagaagggttggcaaagagggaaggggacaggccagttctgcacctggcctttctccagaatgaaggcctccacctcccgtcccaccccacagaaagaaaagtaaactgttttcgcggctgcgcagaaagaagaacatggtacgagcagtgagtgctgcggaggggcgcagaggcccgcgccctggctggccctgtgcatgctgccttgcgccctgctcccaggtgccactaacccgtaatctggctctgtgtgcatgtgctgcccggcagggctgtcgtgtgcgtgttgggtgggaaggcggaggcggcgcggggcgggctggcctctgagcatctggctgcatttagcacg

SEQ ID NO: 565 - DNA, 504 bp, synthetic construct
  misc_feature 1..504: note = Synthetic
  source 1..504: mol_type = other DNA
gagcctcctgcccctcaccaggccctgttagcatcacctcgggcacctggccacagcaggggccagtcagggcaccccgggatagcacgcccaggccctgtgcaaggcctctggcacttaggagaggcttttgcccctttgtcctctgagcagaagggttggcaaagagggaaggggacaggccagttctgcacctggcctttctccagaatgaaggcctccacctcccgtcccaccccacagaaagaaaagtaaactgttttcgcggctgcgcagaaagaagaacatggtacgagcagtgagtgctgcggaggggcgcagaggcccgcgccctggctggccctgtgcatgctgccttgcgccctgctcccaggtgccactaacccgtaatctgctgctctgtgtgcagtgctgcccggcagggctgtcgtgtgcgtgttgggtgggaaggcggaggcggcgcggggcgggctggcctctgagcatctggctgcatttagcacg

SEQ ID NO: 566 - DNA, 505 bp, synthetic construct
  misc_feature 1..505: note = Synthetic
  source 1..505: mol_type = other DNA
gagcctcctgcccctcaccaggccctgttagcatcacctcgggcacctggccacagcaggggccagtcagggcaccccgggatagcacgcccaggccctgtgcaaggcctctggcacttaggagaggcttttgcccctttgtcctctgagcagaagggttggcaaagagggaaggggacaggccagttctgcacctggcctttctccagaatgaaggcctccacctcccgtcccaccccacagaaagaaaagtaaactgttttcgcggctgcgcagaaagaagaacatggtacgagcagtgagtgctgcggaggggcgcagaggcccgcgccctggctggccctgtgcatgctgccttgcgccctgctcccaggtgccactaacccgtaatctgctgctctgtgtgcatgtgctgcccggcagggctgtcgtgtgcgtgttgggtgggaaggcggaggcggcgcggggcgggctggcctctgagcatctggctgcatttagcacg

SEQ ID NO: 567 - DNA, 503 bp, synthetic construct
  misc_feature 1..503: note = Synthetic
  source 1..503: mol_type = other DNA
gagcctcctgcccctcaccaggccctgttagcatcacctcgggcacctggccacagcaggggccagtcagggcaccccgggatagcacgcccaggccctgtgcaaggcctctggcacttaggagaggcttttgcccctttgtcctctgagcagaagggttggcaaagagggaaggggacaggccagttctgcacctggcctttctccagaatgaaggcctccacctcccgtcccaccccacagaaagaaaagtaaactgttttcgcggctgcgcagaaagaagaacatggtacgagcagtgagtgctgcggaggggcgcagaggcccgcgccctggctggccctgtgcatgctgccttgcgccctgctcccaggtgctcactaacccgtaatctggctctgtgtgcagtgctgcccggcagggctgtcgtgtgcgtgttgggtgggaaggcggaggcggcgcggggcgggctggcctctgagcatctggctgcatttagcacg

SEQ ID NO: 568 - DNA, 504 bp, synthetic construct
  misc_feature 1..504: note = Synthetic
  source 1..504: mol_type = other DNA
gagcctcctgcccctcaccaggccctgttagcatcacctcgggcacctggccacagcaggggccagtcagggcaccccgggatagcacgcccaggccctgtgcaaggcctctggcacttaggagaggcttttgcccctttgtcctctgagcagaagggttggcaaagagggaaggggacaggccagttctgcacctggcctttctccagaatgaaggcctccacctcccgtcccaccccacagaaagaaaagtaaactgttttcgcggctgcgcagaaagaagaacatggtacgagcagtgagtgctgcggaggggcgcagaggcccgcgccctggctggccctgtgcatgctgccttgcgccctgctcccaggtgctcactaacccgtaatctggctctgtgtgcatgtgctgcccggcagggctgtcgtgtgcgtgttgggtgggaaggcggaggcggcgcggggcgggctggcctctgagcatctggctgcatttagcacg

SEQ ID NO: 569 - DNA, 505 bp, synthetic construct
  misc_feature 1..505: note = Synthetic
  source 1..505: mol_type = other DNA
gagcctcctgcccctcaccaggccctgttagcatcacctcgggcacctggccacagcaggggccagtcagggcaccccgggatagcacgcccaggccctgtgcaaggcctctggcacttaggagaggcttttgcccctttgtcctctgagcagaagggttggcaaagagggaaggggacaggccagttctgcacctggcctttctccagaatgaaggcctccacctcccgtcccaccccacagaaagaaaagtaaactgttttcgcggctgcgcagaaagaagaacatggtacgagcagtgagtgctgcggaggggcgcagaggcccgcgccctggctggccctgtgcatgctgccttgcgccctgctcccaggtgctcactaacccgtaatctgctgctctgtgtgcagtgctgcccggcagggctgtcgtgtgcgtgttgggtgggaaggcggaggcggcgcggggcgggctggcctctgagcatctggctgcatttagcacg

SEQ ID NO: 570 - DNA, 506 bp, synthetic construct
  misc_feature 1..506: note = Synthetic
  source 1..506: mol_type = other DNA
gagcctcctgcccctcaccaggccctgttagcatcacctcgggcacctggccacagcaggggccagtcagggcaccccgggatagcacgcccaggccctgtgcaaggcctctggcacttaggagaggcttttgcccctttgtcctctgagcagaagggttggcaaagagggaaggggacaggccagttctgcacctggcctttctccagaatgaaggcctccacctcccgtcccaccccacagaaagaaaagtaaactgttttcgcggctgcgcagaaagaagaacatggtacgagcagtgagtgctgcggaggggcgcagaggcccgcgccctggctggccctgtgcatgctgccttgcgccctgctcccaggtgctcactaacccgtaatctgctgctctgtgtgcatgtgctgcccggcagggctgtcgtgtgcgtgttgggtgggaaggcggaggcggcgcggggcgggctggcctctgagcatctggctgcatttagcacg

SEQ ID NO: 571 - DNA, 501 bp, synthetic construct
  misc_feature 1..501: note = Synthetic
  source 1..501: mol_type = other DNA
gagcctcctgcccctcaccaggccctgttagcatcacctcgggcacctggccacagcaggggccagtcagggcaccccgggatagcacgcccaggccctgtgcaaggcctctggcacttaggagaggcttttgcccctttgtcctctgagcagaagggttggcaaagagggaaggggacaggccagttctgcacctggcctttctccagaatgaaggcctccacctcccgtcccaccccacagaaagaaaagtaaactgttttcgcggctgcgcagaaagaagaacatggttcgtgcagtgagtgctgcggaggggcgcagaggcccgcgccctggctggccctgtgcatgcgccttgcgccctgctcccaggtgccactaacccgtaatctggctctgtgtgcagtgctgcccggcagggctgtcgtgtgcgtgttgggtgggaaggcggaggcggcgcggggcgggctggcctctgagcatctggctgcatttagcacg

SEQ ID NO: 572 - DNA, 502 bp, synthetic construct
  misc_feature 1..502: note = Synthetic
  source 1..502: mol_type = other DNA
gagcctcctgcccctcaccaggccctgttagcatcacctcgggcacctggccacagcaggggccagtcagggcaccccgggatagcacgcccaggccctgtgcaaggcctctggcacttaggagaggcttttgcccctttgtcctctgagcagaagggttggcaaagagggaaggggacaggccagttctgcacctggcctttctccagaatgaaggcctccacctcccgtcccaccccacagaaagaaaagtaaactgttttcgcggctgcgcagaaagaagaacatggttcgtgcagtgagtgctgcggaggggcgcagaggcccgcgccctggctggccctgtgcatgcgccttgcgccctgctcccaggtgccactaacccgtaatctggctctgtgtgcatgtgctgcccggcagggctgtcgtgtgcgtgttgggtgggaaggcggaggcggcgcggggcgggctggcctctgagcatctggctgcatttagcacg

SEQ ID NO: 573 - DNA, 503 bp, synthetic construct
  misc_feature 1..503: note = Synthetic
  source 1..503: mol_type = other DNA
gagcctcctgcccctcaccaggccctgttagcatcacctcgggcacctggccacagcaggggccagtcagggcaccccgggatagcacgcccaggccctgtgcaaggcctctggcacttaggagaggcttttgcccctttgtcctctgagcagaagggttggcaaagagggaaggggacaggccagttctgcacctggcctttctccagaatgaaggcctccacctcccgtcccaccccacagaaagaaaagtaaactgttttcgcggctgcgcagaaagaagaacatggttcgtgcagtgagtgctgcggaggggcgcagaggcccgcgccctggctggccctgtgcatgcgccttgcgccctgctcccaggtgccactaacccgtaatctgctgctctgtgtgcagtgctgcccggcagggctgtcgtgtgcgtgttgggtgggaaggcggaggcggcgcggggcgggctggcctctgagcatctggctgcatttagcacg

SEQ ID NO: 574 - DNA, 504 bp, synthetic construct
  misc_feature 1..504: note = Synthetic
  source 1..504: mol_type = other DNA
gagcctcctgcccctcaccaggccctgttagcatcacctcgggcacctggccacagcaggggccagtcagggcaccccgggatagcacgcccaggccctgtgcaaggcctctggcacttaggagaggcttttgcccctttgtcctctgagcagaagggttggcaaagagggaaggggacaggccagttctgcacctggcctttctccagaatgaaggcctccacctcccgtcccaccccacagaaagaaaagtaaactgttttcgcggctgcgcagaaagaagaacatggttcgtgcagtgagtgctgcggaggggcgcagaggcccgcgccctggctggccctgtgcatgcgccttgcgccctgctcccaggtgccactaacccgtaatctgctgctctgtgtgcatgtgctgcccggcagggctgtcgtgtgcgtgttgggtgggaaggcggaggcggcgcggggcgggctggcctctgagcatctggctgcatttagcacg

SEQ ID NO: 575 - DNA, 502 bp, synthetic construct
  misc_feature 1..502: note = Synthetic
  source 1..502: mol_type = other DNA
gagcctcctgcccctcaccaggccctgttagcatcacctcgggcacctggccacagcaggggccagtcagggcaccccgggatagcacgcccaggccctgtgcaaggcctctggcacttaggagaggcttttgcccctttgtcctctgagcagaagggttggcaaagagggaaggggacaggccagttctgcacctggcctttctccagaatgaaggcctccacctcccgtcccaccccacagaaagaaaagtaaactgttttcgcggctgcgcagaaagaagaacatggttcgtgcagtgagtgctgcggaggggcgcagaggcccgcgccctggctggccctgtgcatgcgccttgcgccctgctcccaggtgctcactaacccgtaatctggctctgtgtgcagtgctgcccggcagggctgtcgtgtgcgtgttgggtgggaaggcggaggcggcgcggggcgggctggcctctgagcatctggctgcatttagcacg

SEQ ID NO: 576 - DNA, 503 bp, synthetic construct
  misc_feature 1..503: note = Synthetic
  source 1..503: mol_type = other DNA
gagcctcctgcccctcaccaggccctgttagcatcacctcgggcacctggccacagcaggggccagtcagggcaccccgggatagcacgcccaggccctgtgcaaggcctctggcacttaggagaggcttttgcccctttgtcctctgagcagaagggttggcaaagagggaaggggacaggccagttctgcacctggcctttctccagaatgaaggcctccacctcccgtcccaccccacagaaagaaaagtaaactgttttcgcggctgcgcagaaagaagaacatggttcgtgcagtgagtgctgcggaggggcgcagaggcccgcgccctggctggccctgtgcatgcgccttgcgccctgctcccaggtgctcactaacccgtaatctggctctgtgtgcatgtgctgcccggcagggctgtcgtgtgcgtgttgggtgggaaggcggaggcggcgcggggcgggctggcctctgagcatctggctgcatttagcacg

SEQ ID NO: 577 - DNA, 504 bp, synthetic construct
  misc_feature 1..504: note = Synthetic
  source 1..504: mol_type = other DNA
gagcctcctgcccctcaccaggccctgttagcatcacctcgggcacctggccacagcaggggccagtcagggcaccccgggatagcacgcccaggccctgtgcaaggcctctggcacttaggagaggcttttgcccctttgtcctctgagcagaagggttggcaaagagggaaggggacaggccagttctgcacctggcctttctccagaatgaaggcctccacctcccgtcccaccccacagaaagaaaagtaaactgttttcgcggctgcgcagaaagaagaacatggttcgtgcagtgagtgctgcggaggggcgcagaggcccgcgccctggctggccctgtgcatgcgccttgcgccctgctcccaggtgctcactaacccgtaatctgctgctctgtgtgcagtgctgcccggcagggctgtcgtgtgcgtgttgggtgggaaggcggaggcggcgcggggcgggctggcctctgagcatctggctgcatttagcacg

SEQ ID NO: 578 - DNA, 505 bp, synthetic construct
  misc_feature 1..505: note = Synthetic
  source 1..505: mol_type = other DNA
gagcctcctgcccctcaccaggccctgttagcatcacctcgggcacctggccacagcaggggccagtcagggcaccccgggatagcacgcccaggccctgtgcaaggcctctggcacttaggagaggcttttgcccctttgtcctctgagcagaagggttggcaaagagggaaggggacaggccagttctgcacctggcctttctccagaatgaaggcctccacctcccgtcccaccccacagaaagaaaagtaaactgttttcgcggctgcgcagaaagaagaacatggttcgtgcagtgagtgctgcggaggggcgcagaggcccgcgccctggctggccctgtgcatgcgccttgcgccctgctcccaggtgctcactaacccgtaatctgctgctctgtgtgcatgtgctgcccggcagggctgtcgtgtgcgtgttgggtgggaaggcggaggcggcgcggggcgggctggcctctgagcatctggctgcatttagcacg

SEQ ID NO: 579 - DNA, 502 bp, synthetic construct
  misc_feature 1..502: note = Synthetic
  source 1..502: mol_type = other DNA
gagcctcctgcccctcaccaggccctgttagcatcacctcgggcacctggccacagcaggggccagtcagggcaccccgggatagcacgcccaggccctgtgcaaggcctctggcacttaggagaggcttttgcccctttgtcctctgagcagaagggttggcaaagagggaaggggacaggccagttctgcacctggcctttctccagaatgaaggcctccacctcccgtcccaccccacagaaagaaaagtaaactgttttcgcggctgcgcagaaagaagaacatggttcgtgcagtgagtgctgcggaggggcgcagaggcccgcgccctggctggccctgtgcatgctgccttgcgccctgctcccaggtgccactaacccgtaatctggctctgtgtgcagtgctgcccggcagggctgtcgtgtgcgtgttgggtgggaaggcggaggcggcgcggggcgggctggcctctgagcatctggctgcatttagcacg

SEQ ID NO: 580 - DNA, 503 bp, synthetic construct
  misc_feature 1..503: note = Synthetic
  source 1..503: mol_type = other DNA
gagcctcctgcccctcaccaggccctgttagcatcacctcgggcacctggccacagcaggggccagtcagggcaccccgggatagcacgcccaggccctgtgcaaggcctctggcacttaggagaggcttttgcccctttgtcctctgagcagaagggttggcaaagagggaaggggacaggccagttctgcacctggcctttctccagaatgaaggcctccacctcccgtcccaccccacagaaagaaaagtaaactgttttcgcggctgcgcagaaagaagaacatggttcgtgcagtgagtgctgcggaggggcgcagaggcccgcgccctggctggccctgtgcatgctgccttgcgccctgctcccaggtgccactaacccgtaatctggctctgtgtgcatgtgctgcccggcagggctgtcgtgtgcgtgttgggtgggaaggcggaggcggcgcggggcgggctggcctctgagcatctggctgcatttagcacg

SEQ ID NO: 581 - DNA, 504 bp, synthetic construct
  misc_feature 1..504: note = Synthetic
  source 1..504: mol_type = other DNA
gagcctcctgcccctcaccaggccctgttagcatcacctcgggcacctggccacagcaggggccagtcagggcaccccgggatagcacgcccaggccctgtgcaaggcctctggcacttaggagaggcttttgcccctttgtcctctgagcagaagggttggcaaagagggaaggggacaggccagttctgcacctggcctttctccagaatgaaggcctccacctcccgtcccaccccacagaaagaaaagtaaactgttttcgcggctgcgcagaaagaagaacatggttcgtgcagtgagtgctgcggaggggcgcagaggcccgcgccctggctggccctgtgcatgctgccttgcgccctgctcccaggtgccactaacccgtaatctgctgctctgtgtgcagtgctgcccggcagggctgtcgtgtgcgtgttgggtgggaaggcggaggcggcgcggggcgggctggcctctgagcatctggctgcatttagcacg

SEQ ID NO: 582 - DNA, 505 bp, synthetic construct
  misc_feature 1..505: note = Synthetic
  source 1..505: mol_type = other DNA
gagcctcctgcccctcaccaggccctgttagcatcacctcgggcacctggccacagcaggggccagtcagggcaccccgggatagcacgcccaggccctgtgcaaggcctctggcacttaggagaggcttttgcccctttgtcctctgagcagaagggttggcaaagagggaaggggacaggccagttctgcacctggcctttctccagaatgaaggcctccacctcccgtcccaccccacagaaagaaaagtaaactgttttcgcggctgcgcagaaagaagaacatggttcgtgcagtgagtgctgcggaggggcgcagaggcccgcgccctggctggccctgtgcatgctgccttgcgccctgctcccaggtgccactaacccgtaatctgctgctctgtgtgcatgtgctgcccggcagggctgtcgtgtgcgtgttgggtgggaaggcggaggcggcgcggggcgggctggcctctgagcatctggctgcatttagcacg

SEQ ID NO: 583 - DNA, 503 bp, synthetic construct
  misc_feature 1..503: note = Synthetic
  source 1..503: mol_type = other DNA
gagcctcctgcccctcaccaggccctgttagcatcacctcgggcacctggccacagcaggggccagtcagggcaccccgggatagcacgcccaggccctgtgcaaggcctctggcacttaggagaggcttttgcccctttgtcctctgagcagaagggttggcaaagagggaaggggacaggccagttctgcacctggcctttctccagaatgaaggcctccacctcccgtcccaccccacagaaagaaaagtaaactgttttcgcggctgcgcagaaagaagaacatggttcgtgcagtgagtgctgcggaggggcgcagaggcccgcgccctggctggccctgtgcatgctgccttgcgccctgctcccaggtgctcactaacccgtaatctggctctgtgtgcagtgctgcccggcagggctgtcgtgtgcgtgttgggtgggaaggcggaggcggcgcggggcgggctggcctctgagcatctggctgcatttagcacg

SEQ ID NO: 584 - DNA, 504 bp, synthetic construct
  misc_feature 1..504: note = Synthetic
  source 1..504: mol_type = other DNA
gagcctcctgcccctcaccaggccctgttagcatcacctcgggcacctggccacagcaggggccagtcagggcaccccgggatagcacgcccaggccctgtgcaaggcctctggcacttaggagaggcttttgcccctttgtcctctgagcagaagggttggcaaagagggaaggggacaggccagttctgcacctggcctttctccagaatgaaggcctccacctcccgtcccaccccacagaaagaaaagtaaactgttttcgcggctgcgcagaaagaagaacatggttcgtgcagtgagtgctgcggaggggcgcagaggcccgcgccctggctggccctgtgcatgctgccttgcgccctgctcccaggtgctcactaacccgtaatctggctctgtgtgcatgtgctgcccggcagggctgtcgtgtgcgtgttgggtgggaaggcggaggcggcgcggggcgggctggcctctgagcatctggctgcatttagcacg

SEQ ID NO: 585 - DNA, 505 bp, synthetic construct
  misc_feature 1..505: note = Synthetic
  source 1..505: mol_type = other DNA
gagcctcctgcccctcaccaggccctgttagcatcacctcgggcacctggccacagcaggggccagtcagggcaccccgggatagcacgcccaggccctgtgcaaggcctctggcacttaggagaggcttttgcccctttgtcctctgagcagaagggttggcaaagagggaaggggacaggccagttctgcacctggcctttctccagaatgaaggcctccacctcccgtcccaccccacagaaagaaaagtaaactgttttcgcggctgcgcagaaagaagaacatggttcgtgcagtgagtgctgcggaggggcgcagaggcccgcgccctggctggccctgtgcatgctgccttgcgccctgctcccaggtgctcactaacccgtaatctgctgctctgtgtgcagtgctgcccggcagggctgtcgtgtgcgtgttgggtgggaaggcggaggcggcgcggggcgggctggcctctgagcatctggctgcatttagcacg

SEQ ID NO: 586 - DNA, 506 bp, synthetic construct
  misc_feature 1..506: note = Synthetic
  source 1..506: mol_type = other DNA
gagcctcctgcccctcaccaggccctgttagcatcacctcgggcacctggccacagcaggggccagtcagggcaccccgggatagcacgcccaggccctgtgcaaggcctctggcacttaggagaggcttttgcccctttgtcctctgagcagaagggttggcaaagagggaaggggacaggccagttctgcacctggcctttctccagaatgaaggcctccacctcccgtcccaccccacagaaagaaaagtaaactgttttcgcggctgcgcagaaagaagaacatggttcgtgcagtgagtgctgcggaggggcgcagaggcccgcgccctggctggccctgtgcatgctgccttgcgccctgctcccaggtgctcactaacccgtaatctgctgctctgtgtgcatgtgctgcccggcagggctgtcgtgtgcgtgttgggtgggaaggcggaggcggcgcggggcgggctggcctctgagcatctggctgcatttagcacg

SEQ ID NO: 587 - DNA, 501 bp, synthetic construct
  misc_feature 1..501: note = Synthetic
  source 1..501: mol_type = other DNA
gagcctcctgcccctcaccaggccctgttagcatcacctcgggcacctggccacagcaggggccagtcagggcaccccgggatagcacgcccaggccctgtgcaaggcctctggcacttaggagaggcttttgcccctttgtcctctgagcagaagggttggcaaagagggaaggggacaggccagttctgcacctggcctttctccagaatgaaggcctccacctcccgcacgtccccacagaaagaaaagtaaactgttttcgcggctgcgcagaaagaagaacatggtacgtgcagtgagtgctgcggaggggcgcagaggcccgcgccctggctggccctgtgcatgcgccttgcgccctgctcccaggtgccactaacccgtaatctggctctgtgtgcagtgctgcccggcagggctgtcgtgtgcgtgttgggtgggaaggcggaggcggcgcggggcgggctggcctctgagcatctggctgcatttagcacg

SEQ ID NO: 588 - DNA, 502 bp, synthetic construct
  misc_feature 1..502: note = Synthetic
  source 1..502: mol_type = other DNA
gagcctcctgcccctcaccaggccctgttagcatcacctcgggcacctggccacagcaggggccagtcagggcaccccgggatagcacgcccaggccctgtgcaaggcctctggcacttaggagaggcttttgcccctttgtcctctgagcagaagggttggcaaagagggaaggggacaggccagttctgcacctggcctttctccagaatgaaggcctccacctcccgcacgtccccacagaaagaaaagtaaactgttttcgcggctgcgcagaaagaagaacatggtacgtgcagtgagtgctgcggaggggcgcagaggcccgcgccctggctggccctgtgcatgcgccttgcgccctgctcccaggtgccactaacccgtaatctggctctgtgtgcatgtgctgcccggcagggctgtcgtgtgcgtgttgggtgggaaggcggaggcggcgcggggcgggctggcctctgagcatctggctgcatttagcacg

SEQ ID NO: 589 - DNA, 503 bp, synthetic construct
  misc_feature 1..503: note = Synthetic
  source 1..503: mol_type = other DNA
gagcctcctgcccctcaccaggccctgttagcatcacctcgggcacctggccacagcaggggccagtcagggcaccccgggatagcacgcccaggccctgtgcaaggcctctggcacttaggagaggcttttgcccctttgtcctctgagcagaagggttggcaaagagggaaggggacaggccagttctgcacctggcctttctccagaatgaaggcctccacctcccgcacgtccccacagaaagaaaagtaaactgttttcgcggctgcgcagaaagaagaacatggtacgtgcagtgagtgctgcggaggggcgcagaggcccgcgccctggctggccctgtgcatgcgccttgcgccctgctcccaggtgccactaacccgtaatctgctgctctgtgtgcagtgctgcccggcagggctgtcgtgtgcgtgttgggtgggaaggcggaggcggcgcggggcgggctggcctctgagcatctggctgcatttagcacg

SEQ ID NO: 590 - DNA, 504 bp, synthetic construct
  misc_feature 1..504: note = Synthetic
  source 1..504: mol_type = other DNA
gagcctcctgcccctcaccaggccctgttagcatcacctcgggcacctggccacagcaggggccagtcagggcaccccgggatagcacgcccaggccctgtgcaaggcctctggcacttaggagaggcttttgcccctttgtcctctgagcagaagggttggcaaagagggaaggggacaggccagttctgcacctggcctttctccagaatgaaggcctccacctcccgcacgtccccacagaaagaaaagtaaactgttttcgcggctgcgcagaaagaagaacatggtacgtgcagtgagtgctgcggaggggcgcagaggcccgcgccctggctggccctgtgcatgcgccttgcgccctgctcccaggtgccactaacccgtaatctgctgctctgtgtgcatgtgctgcccggcagggctgtcgtgtgcgtgttgggtgggaaggcggaggcggcgcggggcgggctggcctctgagcatctggctgcatttagcacg

SEQ ID NO: 591 - DNA, 502 bp, synthetic construct
  misc_feature 1..502: note = Synthetic
  source 1..502: mol_type = other DNA
gagcctcctgcccctcaccaggccctgttagcatcacctcgggcacctggccacagcaggggccagtcagggcaccccgggatagcacgcccaggccctgtgcaaggcctctggcacttaggagaggcttttgcccctttgtcctctgagcagaagggttggcaaagagggaaggggacaggccagttctgcacctggcctttctccagaatgaaggcctccacctcccgcacgtccccacagaaagaaaagtaaactgttttcgcggctgcgcagaaagaagaacatggtacgtgcagtgagtgctgcggaggggcgcagaggcccgcgccctggctggccctgtgcatgcgccttgcgccctgctcccaggtgctcactaacccgtaatctggctctgtgtgcagtgctgcccggcagggctgtcgtgtgcgtgttgggtgggaaggcggaggcggcgcggggcgggctggcctctgagcatctggctgcatttagcacg

SEQ ID NO: 592 - DNA, 503 bp, synthetic construct
  misc_feature 1..503: note = Synthetic
  source 1..503: mol_type = other DNA
gagcctcctgcccctcaccaggccctgttagcatcacctcgggcacctggccacagcaggggccagtcagggcaccccgggatagcacgcccaggccctgtgcaaggcctctggcacttaggagaggcttttgcccctttgtcctctgagcagaagggttggcaaagagggaaggggacaggccagttctgcacctggcctttctccagaatgaaggcctccacctcccgcacgtccccacagaaagaaaagtaaactgttttcgcggctgcgcagaaagaagaacatggtacgtgcagtgagtgctgcggaggggcgcagaggcccgcgccctggctggccctgtgcatgcgccttgcgccctgctcccaggtgctcactaacccgtaatctggctctgtgtgcatgtgctgcccggcagggctgtcgtgtgcgtgttgggtgggaaggcggaggcggcgcggggcgggctggcctctgagcatctggctgcatttagcacg

SEQ ID NO: 593 - DNA, 504 bp, synthetic construct
  misc_feature 1..504: note = Synthetic
  source 1..504: mol_type = other DNA
gagcctcctgcccctcaccaggccctgttagcatcacctcgggcacctggccacagcaggggccagtcagggcaccccgggatagcacgcccaggccctgtgcaaggcctctggcacttaggagaggcttttgcccctttgtcctctgagcagaagggttggcaaagagggaaggggacaggccagttctgcacctggcctttctccagaatgaaggcctccacctcccgcacgtccccacagaaagaaaagtaaactgttttcgcggctgcgcagaaagaagaacatggtacgtgcagtgagtgctgcggaggggcgcagaggcccgcgccctggctggccctgtgcatgcgccttgcgccctgctcccaggtgctcactaacccgtaatctgctgctctgtgtgcagtgctgcccggcagggctgtcgtgtgcgtgttgggtgggaaggcggaggcggcgcggggcgggctggcctctgagcatctggctgcatttagcacg

SEQ ID NO: 594 - DNA, 505 bp, synthetic construct
  misc_feature 1..505: note = Synthetic
  source 1..505: mol_type = other DNA
gagcctcctgcccctcaccaggccctgttagcatcacctcgggcacctggccacagcaggggccagtcagggcaccccgggatagcacgcccaggccctgtgcaaggcctctggcacttaggagaggcttttgcccctttgtcctctgagcagaagggttggcaaagagggaaggggacaggccagttctgcacctggcctttctccagaatgaaggcctccacctcccgcacgtccccacagaaagaaaagtaaactgttttcgcggctgcgcagaaagaagaacatggtacgtgcagtgagtgctgcggaggggcgcagaggcccgcgccctggctggccctgtgcatgcgccttgcgccctgctcccaggtgctcactaacccgtaatctgctgctctgtgtgcatgtgctgcccggcagggctgtcgtgtgcgtgttgggtgggaaggcggaggcggcgcggggcgggctggcctctgagcatctggctgcatttagcacg

SEQ ID NO: 595 - DNA, 502 bp, synthetic construct
  misc_feature 1..502: note = Synthetic
  source 1..502: mol_type = other DNA
gagcctcctgcccctcaccaggccctgttagcatcacctcgggcacctggccacagcaggggccagtcagggcaccccgggatagcacgcccaggccctgtgcaaggcctctggcacttaggagaggcttttgcccctttgtcctctgagcagaagggttggcaaagagggaaggggacaggccagttctgcacctggcctttctccagaatgaaggcctccacctcccgcacgtccccacagaaagaaaagtaaactgttttcgcggctgcgcagaaagaagaacatggtacgtgcagtgagtgctgcggaggggcgcagaggcccgcgccctggctggccctgtgcatgctgccttgcgccctgctcccaggtgccactaacccgtaatctggctctgtgtgcagtgctgcccggcagggctgtcgtgtgcgtgttgggtgggaaggcggaggcggcgcggggcgggctggcctctgagcatctggctgcatttagcacg

SEQ ID NO: 596 - DNA, 503 bp, synthetic construct
  misc_feature 1..503: note = Synthetic
  source 1..503: mol_type = other DNA
gagcctcctgcccctcaccaggccctgttagcatcacctcgggcacctggccacagcaggggccagtcagggcaccccgggatagcacgcccaggccctgtgcaaggcctctggcacttaggagaggcttttgcccctttgtcctctgagcagaagggttggcaaagagggaaggggacaggccagttctgcacctggcctttctccagaatgaaggcctccacctcccgcacgtccccacagaaagaaaagtaaactgttttcgcggctgcgcagaaagaagaacatggtacgtgcagtgagtgctgcggaggggcgcagaggcccgcgccctggctggccctgtgcatgctgccttgcgccctgctcccaggtgccactaacccgtaatctggctctgtgtgcatgtgctgcccggcagggctgtcgtgtgcgtgttgggtgggaaggcggaggcggcgcggggcgggctggcctctgagcatctggctgcatttagcacg

SEQ ID NO: 597 - DNA, 504 bp, synthetic construct
  misc_feature 1..504: note = Synthetic
  source 1..504: mol_type = other DNA
gagcctcctgcccctcaccaggccctgttagcatcacctcgggcacctggccacagcaggggccagtcagggcaccccgggatagcacgcccaggccctgtgcaaggcctctggcacttaggagaggcttttgcccctttgtcctctgagcagaagggttggcaaagagggaaggggacaggccagttctgcacctggcctttctccagaatgaaggcctccacctcccgcacgtccccacagaaagaaaagtaaactgttttcgcggctgcgcagaaagaagaacatggtacgtgcagtgagtgctgcggaggggcgcagaggcccgcgccctggctggccctgtgcatgctgccttgcgccctgctcccaggtgccactaacccgtaatctgctgctctgtgtgcagtgctgcccggcagggctgtcgtgtgcgtgttgggtgggaaggcggaggcggcgcggggcgggctggcctctgagcatctggctgcatttagcacg

SEQ ID NO: 598 - DNA, 505 bp, synthetic construct
  misc_feature 1..505: note = Synthetic
  source 1..505: mol_type = other DNA
gagcctcctgcccctcaccaggccctgttagcatcacctcgggcacctggccacagcaggggccagtcagggcaccccgggatagcacgcccaggccctgtgcaaggcctctggcacttaggagaggcttttgcccctttgtcctctgagcagaagggttggcaaagagggaaggggacaggccagttctgcacctggcctttctccagaatgaaggcctccacctcccgcacgtccccacagaaagaaaagtaaactgttttcgcggctgcgcagaaagaagaacatggtacgtgcagtgagtgctgcggaggggcgcagaggcccgcgccctggctggccctgtgcatgctgccttgcgccctgctcccaggtgccactaacccgtaatctgctgctctgtgtgcatgtgctgcccggcagggctgtcgtgtgcgtgttgggtgggaaggcggaggcggcgcggggcgggctggcctctgagcatctggctgcatttagcacg

SEQ ID NO: 599 - DNA, 503 bp, synthetic construct
  misc_feature 1..503: note = Synthetic
  source 1..503: mol_type = other DNA
gagcctcctgcccctcaccaggccctgttagcatcacctcgggcacctggccacagcaggggccagtcagggcaccccgggatagcacgcccaggccctgtgcaaggcctctggcacttaggagaggcttttgcccctttgtcctctgagcagaagggttggcaaagagggaaggggacaggccagttctgcacctggcctttctccagaatgaaggcctccacctcccgcacgtccccacagaaagaaaagtaaactgttttcgcggctgcgcagaaagaagaacatggtacgtgcagtgagtgctgcggaggggcgcagaggcccgcgccctggctggccctgtgcatgctgccttgcgccctgctcccaggtgctcactaacccgtaatctggctctgtgtgcagtgctgcccggcagggctgtcgtgtgcgtgttgggtgggaaggcggaggcggcgcggggcgggctggcctctgagcatctggctgcatttagcacg

SEQ ID NO: 600 - DNA, 504 bp, synthetic construct
  misc_feature 1..504: note = Synthetic
  source 1..504: mol_type = other DNA
gagcctcctgcccctcaccaggccctgttagcatcacctcgggcacctggccacagcaggggccagtcagggcaccccgggatagcacgcccaggccctgtgcaaggcctctggcacttaggagaggcttttgcccctttgtcctctgagcagaagggttggcaaagagggaaggggacaggccagttctgcacctggcctttctccagaatgaaggcctccacctcccgcacgtccccacagaaagaaaagtaaactgttttcgcggctgcgcagaaagaagaacatggtacgtgcagtgagtgctgcggaggggcgcagaggcccgcgccctggctggccctgtgcatgctgccttgcgccctgctcccaggtgctcactaacccgtaatctggctctgtgtgcatgtgctgcccggcagggctgtcgtgtgcgtgttgggtgggaaggcggaggcggcgcggggcgggctggcctctgagcatctggctgcatttagcacg

SEQ ID NO: 601 - DNA, 505 bp, synthetic construct
  misc_feature 1..505: note = Synthetic
  source 1..505: mol_type = other DNA
gagcctcctgcccctcaccaggccctgttagcatcacctcgggcacctggccacagcaggggccagtcagggcaccccgggatagcacgcccaggccctgtgcaaggcctctggcacttaggagaggcttttgcccctttgtcctctgagcagaagggttggcaaagagggaaggggacaggccagttctgcacctggcctttctccagaatgaaggcctccacctcccgcacgtccccacagaaagaaaagtaaactgttttcgcggctgcgcagaaagaagaacatggtacgtgcagtgagtgctgcggaggggcgcagaggcccgcgccctggctggccctgtgcatgctgccttgcgccctgctcccaggtgctcactaacccgtaatctgctgctctgtgtgcagtgctgcccggcagggctgtcgtgtgcgtgttgggtgggaaggcggaggcggcgcggggcgggctggcctctgagcatctggctgcatttagcacg

SEQ ID NO: 602 - DNA, 506 bp, synthetic construct
  misc_feature 1..506: note = Synthetic
  source 1..506: mol_type = other DNA
gagcctcctgcccctcaccaggccctgttagcatcacctcgggcacctggccacagcaggggccagtcagggcaccccgggatagcacgcccaggccctgtgcaaggcctctggcacttaggagaggcttttgcccctttgtcctctgagcagaagggttggcaaagagggaaggggacaggccagttctgcacctggcctttctccagaatgaaggcctccacctcccgcacgtccccacagaaagaaaagtaaactgttttcgcggctgcgcagaaagaagaacatggtacgtgcagtgagtgctgcggaggggcgcagaggcccgcgccctggctggccctgtgcatgctgccttgcgccctgctcccaggtgctcactaacccgtaatctgctgctctgtgtgcatgtgctgcccggcagggctgtcgtgtgcgtgttgggtgggaaggcggaggcggcgcggggcgggctggcctctgagcatctggctgcatttagcacg

SEQ ID NO: 603 - DNA, 501 bp, synthetic construct
  misc_feature 1..501: note = Synthetic
  source 1..501: mol_type = other DNA
gagcctcctgcccctcaccaggccctgttagcatcacctcgggcacctggccacagcaggggccagtcagggcaccccgggatagcacgcccaggccctgtgcaaggcctctggcacttaggagaggcttttgcccctttgtcctctgagcagaagggttggcaaagagggaaggggacaggccagttctgcacctggcctttctccagaatgaaggcctccacctcccgcacgtccccacagaaagaaaagtaaactgttttcgcggctgcgcagaaagaagaacatggtaagtgcagtgagtgctgcggaggggcgcagaggcccgcgccctggctggccctgtgcatgcgccttgcgccctgctcccaggtgccactaacccgtaatctggctctgtgtgcagtgctgcccggcagggctgtcgtgtgcgtgttgggtgggaaggcggaggcggcgcggggcgggctggcctctgagcatctggctgcatttagcacg

SEQ ID NO: 604 - DNA, 502 bp, synthetic construct
  misc_feature 1..502: note = Synthetic
  source 1..502: mol_type = other DNA
gagcctcctgcccctcaccaggccctgttagcatcacctcgggcacctggccacagcaggggccagtcagggcaccccgggatagcacgcccaggccctgtgcaaggcctctggcacttaggagaggcttttgcccctttgtcctctgagcagaagggttggcaaagagggaaggggacaggccagttctgcacctggcctttctccagaatgaaggcctccacctcccgcacgtccccacagaaagaaaagtaaactgttttcgcggctgcgcagaaagaagaacatggtaagtgcagtgagtgctgcggaggggcgcagaggcccgcgccctggctggccctgtgcatgcgccttgcgccctgctcccaggtgccactaacccgtaatctggctctgtgtgcatgtgctgcccggcagggctgtcgtgtgcgtgttgggtgggaaggcggaggcggcgcggggcgggctggcctctgagcatctggctgcatttagcacg

SEQ ID NO: 605 - DNA, 503 bp, synthetic construct
  misc_feature 1..503: note = Synthetic
  source 1..503: mol_type = other DNA
gagcctcctgcccctcaccaggccctgttagcatcacctcgggcacctggccacagcaggggccagtcagggcaccccgggatagcacgcccaggccctgtgcaaggcctctggcacttaggagaggcttttgcccctttgtcctctgagcagaagggttggcaaagagggaaggggacaggccagttctgcacctggcctttctccagaatgaaggcctccacctcccgcacgtccccacagaaagaaaagtaaactgttttcgcggctgcgcagaaagaagaacatggtaagtgcagtgagtgctgcggaggggcgcagaggcccgcgccctggctggccctgtgcatgcgccttgcgccctgctcccaggtgccactaacccgtaatctgctgctctgtgtgcagtgctgcccggcagggctgtcgtgtgcgtgttgggtgggaaggcggaggcggcgcggggcgggctggcctctgagcatctggctgcatttagcacg

SEQ ID NO: 606 - DNA, 504 bp, synthetic construct
  misc_feature 1..504: note = Synthetic
  source 1..504: mol_type = other DNA
gagcctcctgcccctcaccaggccctgttagcatcacctcgggcacctggccacagcaggggccagtcagggcaccccgggatagcacgcccaggccctgtgcaaggcctctggcacttaggagaggcttttgcccctttgtcctctgagcagaagggttggcaaagagggaaggggacaggccagttctgcacctggcctttctccagaatgaaggcctccacctcccgcacgtccccacagaaagaaaagtaaactgttttcgcggctgcgcagaaagaagaacatggtaagtgcagtgagtgctgcggaggggcgcagaggcccgcgccctggctggccctgtgcatgcgccttgcgccctgctcccaggtgccactaacccgtaatctgctgctctgtgtgcatgtgctgcccggcagggctgtcgtgtgcgtgttgggtgggaaggcggaggcggcgcggggcgggctggcctctgagcatctggctgcatttagcacg

SEQ ID NO: 607 - DNA, 502 bp, synthetic construct
  misc_feature 1..502: note = Synthetic
  source 1..502: mol_type = other DNA
gagcctcctgcccctcaccaggccctgttagcatcacctcgggcacctggccacagcaggggccagtcagggcaccccgggatagcacgcccaggccctgtgcaaggcctctggcacttaggagaggcttttgcccctttgtcctctgagcagaagggttggcaaagagggaaggggacaggccagttctgcacctggcctttctccagaatgaaggcctccacctcccgcacgtccccacagaaagaaaagtaaactgttttcgcggctgcgcagaaagaagaacatggtaagtgcagtgagtgctgcggaggggcgcagaggcccgcgccctggctggccctgtgcatgcgccttgcgccctgctcccaggtgctcactaacccgtaatctggctctgtgtgcagtgctgcccggcagggctgtcgtgtgcgtgttgggtgggaaggcggaggcggcgcggggcgggctggcctctgagcatctggctgcatttagcacg

SEQ ID NO: 608 - DNA, 503 bp, synthetic construct
  misc_feature 1..503: note = Synthetic
  source 1..503: mol_type = other DNA
gagcctcctgcccctcaccaggccctgttagcatcacctcgggcacctggccacagcaggggccagtcagggcaccccgggatagcacgcccaggccctgtgcaaggcctctggcacttaggagaggcttttgcccctttgtcctctgagcagaagggttggcaaagagggaaggggacaggccagttctgcacctggcctttctccagaatgaaggcctccacctcccgcacgtccccacagaaagaaaagtaaactgttttcgcggctgcgcagaaagaagaacatggtaagtgcagtgagtgctgcggaggggcgcagaggcccgcgccctggctggccctgtgcatgcgccttgcgccctgctcccaggtgctcactaacccgtaatctggctctgtgtgcatgtgctgcccggcagggctgtcgtgtgcgtgttgggtgggaaggcggaggcggcgcggggcgggctggcctctgagcatctggctgcatttagcacg

SEQ ID NO: 609 - DNA, 504 bp, synthetic construct
  misc_feature 1..504: note = Synthetic
  source 1..504: mol_type = other DNA
gagcctcctgcccctcaccaggccctgttagcatcacctcgggcacctggccacagcaggggccagtcagggcaccccgggatagcacgcccaggccctgtgcaaggcctctggcacttaggagaggcttttgcccctttgtcctctgagcagaagggttggcaaagagggaaggggacaggccagttctgcacctggcctttctccagaatgaaggcctccacctcccgcacgtccccacagaaagaaaagtaaactgttttcgcggctgcgcagaaagaagaacatggtaagtgcagtgagtgctgcggaggggcgcagaggcccgcgccctggctggccctgtgcatgcgccttgcgccctgctcccaggtgctcactaacccgtaatctgctgctctgtgtgcagtgctgcccggcagggctgtcgtgtgcgtgttgggtgggaaggcggaggcggcgcggggcgggctggcctctgagcatctggctgcatttagcacg

SEQ ID NO: 610 - DNA, 505 bp, synthetic construct
  misc_feature 1..505: note = Synthetic
  source 1..505: mol_type = other DNA
gagcctcctgcccctcaccaggccctgttagcatcacctcgggcacctggccacagcaggggccagtcagggcaccccgggatagcacgcccaggccctgtgcaaggcctctggcacttaggagaggcttttgcccctttgtcctctgagcagaagggttggcaaagagggaaggggacaggccagttctgcacctggcctttctccagaatgaaggcctccacctcccgcacgtccccacagaaagaaaagtaaactgttttcgcggctgcgcagaaagaagaacatggtaagtgcagtgagtgctgcggaggggcgcagaggcccgcgccctggctggccctgtgcatgcgccttgcgccctgctcccaggtgctcactaacccgtaatctgctgctctgtgtgcatgtgctgcccggcagggctgtcgtgtgcgtgttgggtgggaaggcggaggcggcgcggggcgggctggcctctgagcatctggctgcatttagcacg

SEQ ID NO: 611 - DNA, 502 bp, synthetic construct
  misc_feature 1..502: note = Synthetic
  source 1..502: mol_type = other DNA
gagcctcctgcccctcaccaggccctgttagcatcacctcgggcacctggccacagcaggggccagtcagggcaccccgggatagcacgcccaggccctgtgcaaggcctctggcacttaggagaggcttttgcccctttgtcctctgagcagaagggttggcaaagagggaaggggacaggccagttctgcacctggcctttctccagaatgaaggcctccacctcccgcacgtccccacagaaagaaaagtaaactgttttcgcggctgcgcagaaagaagaacatggtaagtgcagtgagtgctgcggaggggcgcagaggcccgcgccctggctggccctgtgcatgctgccttgcgccctgctcccaggtgccactaacccgtaatctggctctgtgtgcagtgctgcccggcagggctgtcgtgtgcgtgttgggtgggaaggcggaggcggcgcggggcgggctggcctctgagcatctggctgcatttagcacg

SEQ ID NO: 612 - DNA, 503 bp, synthetic construct
  misc_feature 1..503: note = Synthetic
  source 1..503: mol_type = other DNA
gagcctcctgcccctcaccaggccctgttagcatcacctcgggcacctggccacagcaggggccagtcagggcaccccgggatagcacgcccaggccctgtgcaaggcctctggcacttaggagaggcttttgcccctttgtcctctgagcagaagggttggcaaagagggaaggggacaggccagttctgcacctggcctttctccagaatgaaggcctccacctcccgcacgtccccacagaaagaaaagtaaactgttttcgcggctgcgcagaaagaagaacatggtaagtgcagtgagtgctgcggaggggcgcagaggcccgcgccctggctggccctgtgcatgctgccttgcgccctgctcccaggtgccactaacccgtaatctggctctgtgtgcatgtgctgcccggcagggctgtcgtgtgcgtgttgggtgggaaggcggaggcggcgcggggcgggctggcctctgagcatctggctgcatttagcacg

SEQ ID NO: 613 - DNA, 504 bp, synthetic construct
  misc_feature 1..504: note = Synthetic
  source 1..504: mol_type = other DNA
gagcctcctgcccctcaccaggccctgttagcatcacctcgggcacctggccacagcaggggccagtcagggcaccccgggatagcacgcccaggccctgtgcaaggcctctggcacttaggagaggcttttgcccctttgtcctctgagcagaagggttggcaaagagggaaggggacaggccagttctgcacctggcctttctccagaatgaaggcctccacctcccgcacgtccccacagaaagaaaagtaaactgttttcgcggctgcgcagaaagaagaacatggtaagtgcagtgagtgctgcggaggggcgcagaggcccgcgccctggctggccctgtgcatgctgccttgcgccctgctcccaggtgccactaacccgtaatctgctgctctgtgtgcagtgctgcccggcagggctgtcgtgtgcgtgttgggtgggaaggcggaggcggcgcggggcgggctggcctctgagcatctggctgcatttagcacg

SEQ ID NO: 614 - DNA, 505 bp, synthetic construct
  misc_feature 1..505: note = Synthetic
  source 1..505: mol_type = other DNA
gagcctcctgcccctcaccaggccctgttagcatcacctcgggcacctggccacagcaggggccagtcagggcaccccgggatagcacgcccaggccctgtgcaaggcctctggcacttaggagaggcttttgcccctttgtcctctgagcagaagggttggcaaagagggaaggggacaggccagttctgcacctggcctttctccagaatgaaggcctccacctcccgcacgtccccacagaaagaaaagtaaactgttttcgcggctgcgcagaaagaagaacatggtaagtgcagtgagtgctgcggaggggcgcagaggcccgcgccctggctggccctgtgcatgctgccttgcgccctgctcccaggtgccactaacccgtaatctgctgctctgtgtgcatgtgctgcccggcagggctgtcgtgtgcgtgttgggtgggaaggcggaggcggcgcggggcgggctggcctctgagcatctggctgcatttagcacg

SEQ ID NO: 615 - DNA, 503 bp, synthetic construct
  misc_feature 1..503: note = Synthetic
  source 1..503: mol_type = other DNA
gagcctcctgcccctcaccaggccctgttagcatcacctcgggcacctggccacagcaggggccagtcagggcaccccgggatagcacgcccaggccctgtgcaaggcctctggcacttaggagaggcttttgcccctttgtcctctgagcagaagggttggcaaagagggaaggggacaggccagttctgcacctggcctttctccagaatgaaggcctccacctcccgcacgtccccacagaaagaaaagtaaactgttttcgcggctgcgcagaaagaagaacatggtaagtgcagtgagtgctgcggaggggcgcagaggcccgcgccctggctggccctgtgcatgctgccttgcgccctgctcccaggtgctcactaacccgtaatctggctctgtgtgcagtgctgcccggcagggctgtcgtgtgcgtgttgggtgggaaggcggaggcggcgcggggcgggctggcctctgagcatctggctgcatttagcacg

SEQ ID NO: 616 - DNA, 504 bp, synthetic construct
  misc_feature 1..504: note = Synthetic
  source 1..504: mol_type = other DNA
gagcctcctgcccctcaccaggccctgttagcatcacctcgggcacctggccacagcaggggccagtcagggcaccccgggatagcacgcccaggccctgtgcaaggcctctggcacttaggagaggcttttgcccctttgtcctctgagcagaagggttggcaaagagggaaggggacaggccagttctgcacctggcctttctccagaatgaaggcctccacctcccgcacgtccccacagaaagaaaagtaaactgttttcgcggctgcgcagaaagaagaacatggtaagtgcagtgagtgctgcggaggggcgcagaggcccgcgccctggctggccctgtgcatgctgccttgcgccctgctcccaggtgctcactaacccgtaatctggctctgtgtgcatgtgctgcccggcagggctgtcgtgtgcgtgttgggtgggaaggcggaggcggcgcggggcgggctggcctctgagcatctggctgcatttagcacg

SEQ ID NO: 617 - DNA, 505 bp, synthetic construct
  misc_feature 1..505: note = Synthetic
  source 1..505: mol_type = other DNA
gagcctcctgcccctcaccaggccctgttagcatcacctcgggcacctggccacagcaggggccagtcagggcaccccgggatagcacgcccaggccctgtgcaaggcctctggcacttaggagaggcttttgcccctttgtcctctgagcagaagggttggcaaagagggaaggggacaggccagttctgcacctggcctttctccagaatgaaggcctccacctcccgcacgtccccacagaaagaaaagtaaactgttttcgcggctgcgcagaaagaagaacatggtaagtgcagtgagtgctgcggaggggcgcagaggcccgcgccctggctggccctgtgcatgctgccttgcgccctgctcccaggtgctcactaacccgtaatctgctgctctgtgtgcagtgctgcccggcagggctgtcgtgtgcgtgttgggtgggaaggcggaggcggcgcggggcgggctggcctctgagcatctggctgcatttagcacg

SEQ ID NO: 618 - DNA, 506 bp, synthetic construct
  misc_feature 1..506: note = Synthetic
  source 1..506: mol_type = other DNA
gagcctcctgcccctcaccaggccctgttagcatcacctcgggcacctggccacagcaggggccagtcagggcaccccgggatagcacgcccaggccctgtgcaaggcctctggcacttaggagaggcttttgcccctttgtcctctgagcagaagggttggcaaagagggaaggggacaggccagttctgcacctggcctttctccagaatgaaggcctccacctcccgcacgtccccacagaaagaaaagtaaactgttttcgcggctgcgcagaaagaagaacatggtaagtgcagtgagtgctgcggaggggcgcagaggcccgcgccctggctggccctgtgcatgctgccttgcgccctgctcccaggtgctcactaacccgtaatctgctgctctgtgtgcatgtgctgcccggcagggctgtcgtgtgcgtgttgggtgggaaggcggaggcggcgcggggcgggctggcctctgagcatctggctgcatttagcacg

SEQ ID NO: 619 - DNA, 501 bp, synthetic construct
  misc_feature 1..501: note = Synthetic
  source 1..501: mol_type = other DNA
gagcctcctgcccctcaccaggccctgttagcatcacctcgggcacctggccacagcaggggccagtcagggcaccccgggatagcacgcccaggccctgtgcaaggcctctggcacttaggagaggcttttgcccctttgtcctctgagcagaagggttggcaaagagggaaggggacaggccagttctgcacctggcctttctccagaatgaaggcctccacctcccgcacgtccccacagaaagaaaagtaaactgttttcgcggctgcgcagaaagaagaacatggtaggtgcagtgagtgctgcggaggggcgcagaggcccgcgccctggctggccctgtgcatgcgccttgcgccctgctcccaggtgccactaacccgtaatctggctctgtgtgcagtgctgcccggcagggctgtcgtgtgcgtgttgggtgggaaggcggaggcggcgcggggcgggctggcctctgagcatctggctgcatttagcacg

SEQ ID NO: 620 - DNA, 502 bp, synthetic construct
  misc_feature 1..502: note = Synthetic
  source 1..502: mol_type = other DNA
gagcctcctgcccctcaccaggccctgttagcatcacctcgggcacctggccacagcaggggccagtcagggcaccccgggatagcacgcccaggccctgtgcaaggcctctggcacttaggagaggcttttgcccctttgtcctctgagcagaagggttggcaaagagggaaggggacaggccagttctgcacctggcctttctccagaatgaaggcctccacctcccgcacgtccccacagaaagaaaagtaaactgttttcgcggctgcgcagaaagaagaacatggtaggtgcagtgagtgctgcggaggggcgcagaggcccgcgccctggctggccctgtgcatgcgccttgcgccctgctcccaggtgccactaacccgtaatctggctctgtgtgcatgtgctgcccggcagggctgtcgtgtgcgtgttgggtgggaaggcggaggcggcgcggggcgggctggcctctgagcatctggctgcatttagcacg

SEQ ID NO: 621 - DNA, 503 bp, synthetic construct
  misc_feature 1..503: note = Synthetic
  source 1..503: mol_type = other DNA
gagcctcctgcccctcaccaggccctgttagcatcacctcgggcacctggccacagcaggggccagtcagggcaccccgggatagcacgcccaggccctgtgcaaggcctctggcacttaggagaggcttttgcccctttgtcctctgagcagaagggttggcaaagagggaaggggacaggccagttctgcacctggcctttctccagaatgaaggcctccacctcccgcacgtccccacagaaagaaaagtaaactgttttcgcggctgcgcagaaagaagaacatggtaggtgcagtgagtgctgcggaggggcgcagaggcccgcgccctggctggccctgtgcatgcgccttgcgccctgctcccaggtgccactaacccgtaatctgctgctctgtgtgcagtgctgcccggcagggctgtcgtgtgcgtgttgggtgggaaggcggaggcggcgcggggcgggctggcctctgagcatctggctgcatttagcacg

SEQ ID NO: 622 - DNA, 504 bp, synthetic construct
  misc_feature 1..504: note = Synthetic
  source 1..504: mol_type = other DNA
gagcctcctgcccctcaccaggccctgttagcatcacctcgggcacctggccacagcaggggccagtcagggcaccccgggatagcacgcccaggccctgtgcaaggcctctggcacttaggagaggcttttgcccctttgtcctctgagcagaagggttggcaaagagggaaggggacaggccagttctgcacctggcctttctccagaatgaaggcctccacctcccgcacgtccccacagaaagaaaagtaaactgttttcgcggctgcgcagaaagaagaacatggtaggtgcagtgagtgctgcggaggggcgcagaggcccgcgccctggctggccctgtgcatgcgccttgcgccctgctcccaggtgccactaacccgtaatctgctgctctgtgtgcatgtgctgcccggcagggctgtcgtgtgcgtgttgggtgggaaggcggaggcggcgcggggcgggctggcctctgagcatctggctgcatttagcacg

SEQ ID NO: 623 - DNA, 502 bp, synthetic construct
  misc_feature 1..502: note = Synthetic
  source 1..502: mol_type = other DNA
gagcctcctgcccctcaccaggccctgttagcatcacctcgggcacctggccacagcaggggccagtcagggcaccccgggatagcacgcccaggccctgtgcaaggcctctggcacttaggagaggcttttgcccctttgtcctctgagcagaagggttggcaaagagggaaggggacaggccagttctgcacctggcctttctccagaatgaaggcctccacctcccgcacgtccccacagaaagaaaagtaaactgttttcgcggctgcgcagaaagaagaacatggtaggtgcagtgagtgctgcggaggggcgcagaggcccgcgccctggctggccctgtgcatgcgccttgcgccctgctcccaggtgctcactaacccgtaatctggctctgtgtgcagtgctgcccggcagggctgtcgtgtgcgtgttgggtgggaaggcggaggcggcgcggggcgggctggcctctgagcatctggctgcatttagcacg

SEQ ID NO: 624 - DNA, 503 bp, synthetic construct
  misc_feature 1..503: note = Synthetic
  source 1..503: mol_type = other DNA
gagcctcctgcccctcaccaggccctgttagcatcacctcgggcacctggccacagcaggggccagtcagggcaccccgggatagcacgcccaggccctgtgcaaggcctctggcacttaggagaggcttttgcccctttgtcctctgagcagaagggttggcaaagagggaaggggacaggccagttctgcacctggcctttctccagaatgaaggcctccacctcccgcacgtccccacagaaagaaaagtaaactgttttcgcggctgcgcagaaagaagaacatggtaggtgcagtgagtgctgcggaggggcgcagaggcccgcgccctggctggccctgtgcatgcgccttgcgccctgctcccaggtgctcactaacccgtaatctggctctgtgtgcatgtgctgcccggcagggctgtcgtgtgcgtgttgggtgggaaggcggaggcggcgcggggcgggctggcctctgagcatctggctgcatttagcacg

SEQ ID NO: 625 - DNA, 504 bp, synthetic construct
  misc_feature 1..504: note = Synthetic
  source 1..504: mol_type = other DNA
gagcctcctgcccctcaccaggccctgttagcatcacctcgggcacctggccacagcaggggccagtcagggcaccccgggatagcacgcccaggccctgtgcaaggcctctggcacttaggagaggcttttgcccctttgtcctctgagcagaagggttggcaaagagggaaggggacaggccagttctgcacctggcctttctccagaatgaaggcctccacctcccgcacgtccccacagaaagaaaagtaaactgttttcgcggctgcgcagaaagaagaacatggtaggtgcagtgagtgctgcggaggggcgcagaggcccgcgccctggctggccctgtgcatgcgccttgcgccctgctcccaggtgctcactaacccgtaatctgctgctctgtgtgcagtgctgcccggcagggctgtcgtgtgcgtgttgggtgggaaggcggaggcggcgcggggcgggctggcctctgagcatctggctgcatttagcacg

SEQ ID NO: 626 - DNA, 505 bp, synthetic construct
  misc_feature 1..505: note = Synthetic
  source 1..505: mol_type = other DNA
gagcctcctgcccctcaccaggccctgttagcatcacctcgggcacctggccacagcaggggccagtcagggcaccccgggatagcacgcccaggccctgtgcaaggcctctggcacttaggagaggcttttgcccctttgtcctctgagcagaagggttggcaaagagggaaggggacaggccagttctgcacctggcctttctccagaatgaaggcctccacctcccgcacgtccccacagaaagaaaagtaaactgttttcgcggctgcgcagaaagaagaacatggtaggtgcagtgagtgctgcggaggggcgcagaggcccgcgccctggctggccctgtgcatgcgccttgcgccctgctcccaggtgctcactaacccgtaatctgctgctctgtgtgcatgtgctgcccggcagggctgtcgtgtgcgtgttgggtgggaaggcggaggcggcgcggggcgggctggcctctgagcatctggctgcatttagcacg

SEQ ID NO: 627 - DNA, 502 bp, synthetic construct
  misc_feature 1..502: note = Synthetic
  source 1..502: mol_type = other DNA
gagcctcctgcccctcaccaggccctgttagcatcacctcgggcacctggccacagcaggggccagtcagggcaccccgggatagcacgcccaggccctgtgcaaggcctctggcacttaggagaggcttttgcccctttgtcctctgagcagaagggttggcaaagagggaaggggacaggccagttctgcacctggcctttctccagaatgaaggcctccacctcccgcacgtccccacagaaagaaaagtaaactgttttcgcggctgcgcagaaagaagaacatggtaggtgcagtgagtgctgcggaggggcgcagaggcccgcgccctggctggccctgtgcatgctgccttgcgccctgctcccaggtgccactaacccgtaatctggctctgtgtgcagtgctgcccggcagggctgtcgtgtgcgtgttgggtgggaaggcggaggcggcgcggggcgggctggcctctgagcatctggctgcatttagcacg

SEQ ID NO: 628 - DNA, 503 bp, synthetic construct
  misc_feature 1..503: note = Synthetic
  source 1..503: mol_type = other DNA
gagcctcctgcccctcaccaggccctgttagcatcacctcgggcacctggccacagcaggggccagtcagggcaccccgggatagcacgcccaggccctgtgcaaggcctctggcacttaggagaggcttttgcccctttgtcctctgagcagaagggttggcaaagagggaaggggacaggccagttctgcacctggcctttctccagaatgaaggcctccacctcccgcacgtccccacagaaagaaaagtaaactgttttcgcggctgcgcagaaagaagaacatggtaggtgcagtgagtgctgcggaggggcgcagaggcccgcgccctggctggccctgtgcatgctgccttgcgccctgctcccaggtgccactaacccgtaatctggctctgtgtgcatgtgctgcccggcagggctgtcgtgtgcgtgttgggtgggaaggcggaggcggcgcggggcgggctggcctctgagcatctggctgcatttagcacg

SEQ ID NO: 629 - DNA, 504 bp, synthetic construct
  misc_feature 1..504: note = Synthetic
  source 1..504: mol_type = other DNA
gagcctcctgcccctcaccaggccctgttagcatcacctcgggcacctggccacagcaggggccagtcagggcaccccgggatagcacgcccaggccctgtgcaaggcctctggcacttaggagaggcttttgcccctttgtcctctgagcagaagggttggcaaagagggaaggggacaggccagttctgcacctggcctttctccagaatgaaggcctccacctcccgcacgtccccacagaaagaaaagtaaactgttttcgcggctgcgcagaaagaagaacatggtaggtgcagtgagtgctgcggaggggcgcagaggcccgcgccctggctggccctgtgcatgctgccttgcgccctgctcccaggtgccactaacccgtaatctgctgctctgtgtgcagtgctgcccggcagggctgtcgtgtgcgtgttgggtgggaaggcggaggcggcgcggggcgggctggcctctgagcatctggctgcatttagcacg

SEQ ID NO: 630 - DNA, 505 bp, synthetic construct
  misc_feature 1..505: note = Synthetic
  source 1..505: mol_type = other DNA
gagcctcctgcccctcaccaggccctgttagcatcacctcgggcacctggccacagcaggggccagtcagggcaccccgggatagcacgcccaggccctgtgcaaggcctctggcacttaggagaggcttttgcccctttgtcctctgagcagaagggttggcaaagagggaaggggacaggccagttctgcacctggcctttctccagaatgaaggcctccacctcccgcacgtccccacagaaagaaaagtaaactgttttcgcggctgcgcagaaagaagaacatggtaggtgcagtgagtgctgcggaggggcgcagaggcccgcgccctggctggccctgtgcatgctgccttgcgccctgctcccaggtgccactaacccgtaatctgctgctctgtgtgcatgtgctgcccggcagggctgtcgtgtgcgtgttgggtgggaaggcggaggcggcgcggggcgggctggcctctgagcatctggctgcatttagcacg

SEQ ID NO: 631 - DNA, 503 bp, synthetic construct
  misc_feature 1..503: note = Synthetic
  source 1..503: mol_type = other DNA
gagcctcctgcccctcaccaggccctgttagcatcacctcgggcacctggccacagcaggggccagtcagggcaccccgggatagcacgcccaggccctgtgcaaggcctctggcacttaggagaggcttttgcccctttgtcctctgagcagaagggttggcaaagagggaaggggacaggccagttctgcacctggcctttctccagaatgaaggcctccacctcccgcacgtccccacagaaagaaaagtaaactgttttcgcggctgcgcagaaagaagaacatggtaggtgcagtgagtgctgcggaggggcgcagaggcccgcgccctggctggccctgtgcatgctgccttgcgccctgctcccaggtgctcactaacccgtaatctggctctgtgtgcagtgctgcccggcagggctgtcgtgtgcgtgttgggtgggaaggcggaggcggcgcggggcgggctggcctctgagcatctggctgcatttagcacg

SEQ ID NO: 632 - DNA, 504 bp, synthetic construct
  misc_feature 1..504: note = Synthetic
  source 1..504: mol_type = other DNA
gagcctcctgcccctcaccaggccctgttagcatcacctcgggcacctggccacagcaggggccagtcagggcaccccgggatagcacgcccaggccctgtgcaaggcctctggcacttaggagaggcttttgcccctttgtcctctgagcagaagggttggcaaagagggaaggggacaggccagttctgcacctggcctttctccagaatgaaggcctccacctcccgcacgtccccacagaaagaaaagtaaactgttttcgcggctgcgcagaaagaagaacatggtaggtgcagtgagtgctgcggaggggcgcagaggcccgcgccctggctggccctgtgcatgctgccttgcgccctgctcccaggtgctcactaacccgtaatctggctctgtgtgcatgtgctgcccggcagggctgtcgtgtgcgtgttgggtgggaaggcggaggcggcgcggggcgggctggcctctgagcatctggctgcatttagcacg

SEQ ID NO: 633 - DNA, 505 bp, synthetic construct
  misc_feature 1..505: note = Synthetic
  source 1..505: mol_type = other DNA
gagcctcctgcccctcaccaggccctgttagcatcacctcgggcacctggccacagcaggggccagtcagggcaccccgggatagcacgcccaggccctgtgcaaggcctctggcacttaggagaggcttttgcccctttgtcctctgagcagaagggttggcaaagagggaaggggacaggccagttctgcacctggcctttctccagaatgaaggcctccacctcccgcacgtccccacagaaagaaaagtaaactgttttcgcggctgcgcagaaagaagaacatggtaggtgcagtgagtgctgcggaggggcgcagaggcccgcgccctggctggccctgtgcatgctgccttgcgccctgctcccaggtgctcactaacccgtaatctgctgctctgtgtgcagtgctgcccggcagggctgtcgtgtgcgtgttgggtgggaaggcggaggcggcgcggggcgggctggcctctgagcatctggctgcatttagcacg

SEQ ID NO: 634 - DNA, 506 bp, synthetic construct
  misc_feature 1..506: note = Synthetic
  source 1..506: mol_type = other DNA
gagcctcctgcccctcaccaggccctgttagcatcacctcgggcacctggccacagcaggggccagtcagggcaccccgggatagcacgcccaggccctgtgcaaggcctctggcacttaggagaggcttttgcccctttgtcctctgagcagaagggttggcaaagagggaaggggacaggccagttctgcacctggcctttctccagaatgaaggcctccacctcccgcacgtccccacagaaagaaaagtaaactgttttcgcggctgcgcagaaagaagaacatggtaggtgcagtgagtgctgcggaggggcgcagaggcccgcgccctggctggccctgtgcatgctgccttgcgccctgctcccaggtgctcactaacccgtaatctgctgctctgtgtgcatgtgctgcccggcagggctgtcgtgtgcgtgttgggtgggaaggcggaggcggcgcggggcgggctggcctctgagcatctggctgcatttagcacg

SEQ ID NO: 635 - DNA, 501 bp, synthetic construct
  misc_feature 1..501: note = Synthetic
  source 1..501: mol_type = other DNA
gagcctcctgcccctcaccaggccctgttagcatcacctcgggcacctggccacagcaggggccagtcagggcaccccgggatagcacgcccaggccctgtgcaaggcctctggcacttaggagaggcttttgcccctttgtcctctgagcagaagggttggcaaagagggaaggggacaggccagttctgcacctggcctttctccagaatgaaggcctccacctcccgcacgtccccacagaaagaaaagtaaactgttttcgcggctgcgcagaaagaagaacatggtatgtgcagtgagtgctgcggaggggcgcagaggcccgcgccctggctggccctgtgcatgcgccttgcgccctgctcccaggtgccactaacccgtaatctggctctgtgtgcagtgctgcccggcagggctgtcgtgtgcgtgttgggtgggaaggcggaggcggcgcggggcgggctggcctctgagcatctggctgcatttagcacg

SEQ ID NO: 636 - DNA, 502 bp, synthetic construct
  misc_feature 1..502: note = Synthetic
  source 1..502: mol_type = other DNA
gagcctcctgcccctcaccaggccctgttagcatcacctcgggcacctggccacagcaggggccagtcagggcaccccgggatagcacgcccaggccctgtgcaaggcctctggcacttaggagaggcttttgcccctttgtcctctgagcagaagggttggcaaagagggaaggggacaggccagttctgcacctggcctttctccagaatgaaggcctccacctcccgcacgtccccacagaaagaaaagtaaactgttttcgcggctgcgcagaaagaagaacatggtatgtgcagtgagtgctgcggaggggcgcagaggcccgcgccctggctggccctgtgcatgcgccttgcgccctgctcccaggtgccactaacccgtaatctggctctgtgtgcatgtgctgcccggcagggctgtcgtgtgcgtgttgggtgggaaggcggaggcggcgcggggcgggctggcctctgagcatctggctgcatttagcacg

SEQ ID NO: 637 - DNA, 503 bp, synthetic construct
  misc_feature 1..503: note = Synthetic
  source 1..503: mol_type = other DNA
gagcctcctgcccctcaccaggccctgttagcatcacctcgggcacctggccacagcaggggccagtcagggcaccccgggatagcacgcccaggccctgtgcaaggcctctggcacttaggagaggcttttgcccctttgtcctctgagcagaagggttggcaaagagggaaggggacaggccagttctgcacctggcctttctccagaatgaaggcctccacctcccgcacgtccccacagaaagaaaagtaaactgttttcgcggctgcgcagaaagaagaacatggtatgtgcagtgagtgctgcggaggggcgcagaggcccgcgccctggctggccctgtgcatgcgccttgcgccctgctcccaggtgccactaacccgtaatctgctgctctgtgtgcagtgctgcccggcagggctgtcgtgtgcgtgttgggtgggaaggcggaggcggcgcggggcgggctggcctctgagcatctggctgcatttagcacg

SEQ ID NO: 638 - DNA, 504 bp, synthetic construct
  misc_feature 1..504: note = Synthetic
  source 1..504: mol_type = other DNA
gagcctcctgcccctcaccaggccctgttagcatcacctcgggcacctggccacagcaggggccagtcagggcaccccgggatagcacgcccaggccctgtgcaaggcctctggcacttaggagaggcttttgcccctttgtcctctgagcagaagggttggcaaagagggaaggggacaggccagttctgcacctggcctttctccagaatgaaggcctccacctcccgcacgtccccacagaaagaaaagtaaactgttttcgcggctgcgcagaaagaagaacatggtatgtgcagtgagtgctgcggaggggcgcagaggcccgcgccctggctggccctgtgcatgcgccttgcgccctgctcccaggtgccactaacccgtaatctgctgctctgtgtgcatgtgctgcccggcagggctgtcgtgtgcgtgttgggtgggaaggcggaggcggcgcggggcgggctggcctctgagcatctggctgcatttagcacg

SEQ ID NO: 639 - DNA, 502 bp, synthetic construct
  misc_feature 1..502: note = Synthetic
  source 1..502: mol_type = other DNA
gagcctcctgcccctcaccaggccctgttagcatcacctcgggcacctggccacagcaggggccagtcagggcaccccgggatagcacgcccaggccctgtgcaaggcctctggcacttaggagaggcttttgcccctttgtcctctgagcagaagggttggcaaagagggaaggggacaggccagttctgcacctggcctttctccagaatgaaggcctccacctcccgcacgtccccacagaaagaaaagtaaactgttttcgcggctgcgcagaaagaagaacatggtatgtgcagtgagtgctgcggaggggcgcagaggcccgcgccctggctggccctgtgcatgcgccttgcgccctgctcccaggtgctcactaacccgtaatctggctctgtgtgcagtgctgcccggcagggctgtcgtgtgcgtgttgggtgggaaggcggaggcggcgcggggcgggctggcctctgagcatctggctgcatttagcacg

SEQ ID NO: 640 - DNA, 503 bp, synthetic construct
  misc_feature 1..503: note = Synthetic
  source 1..503: mol_type = other DNA
gagcctcctgcccctcaccaggccctgttagcatcacctcgggcacctggccacagcaggggccagtcagggcaccccgggatagcacgcccaggccctgtgcaaggcctctggcacttaggagaggcttttgcccctttgtcctctgagcagaagggttggcaaagagggaaggggacaggccagttctgcacctggcctttctccagaatgaaggcctccacctcccgcacgtccccacagaaagaaaagtaaactgttttcgcggctgcgcagaaagaagaacatggtatgtgcagtgagtgctgcggaggggcgcagaggcccgcgccctggctggccctgtgcatgcgccttgcgccctgctcccaggtgctcactaacccgtaatctggctctgtgtgcatgtgctgcccggcagggctgtcgtgtgcgtgttgggtgggaaggcggaggcggcgcggggcgggctggcctctgagcatctggctgcatttagcacg

SEQ ID NO: 641 - DNA, 504 bp, synthetic construct
  misc_feature 1..504: note = Synthetic
  source 1..504: mol_type = other DNA
gagcctcctgcccctcaccaggccctgttagcatcacctcgggcacctggccacagcaggggccagtcagggcaccccgggatagcacgcccaggccctgtgcaaggcctctggcacttaggagaggcttttgcccctttgtcctctgagcagaagggttggcaaagagggaaggggacaggccagttctgcacctggcctttctccagaatgaaggcctccacctcccgcacgtccccacagaaagaaaagtaaactgttttcgcggctgcgcagaaagaagaacatggtatgtgcagtgagtgctgcggaggggcgcagaggcccgcgccctggctggccctgtgcatgcgccttgcgccctgctcccaggtgctcactaacccgtaatctgctgctctgtgtgcagtgctgcccggcagggctgtcgtgtgcgtgttgggtgggaaggcggaggcggcgcggggcgggctggcctctgagcatctggctgcatttagcacg

SEQ ID NO: 642 - DNA, 505 bp, synthetic construct
  misc_feature 1..505: note = Synthetic
  source 1..505: mol_type = other DNA
gagcctcctgcccctcaccaggccctgttagcatcacctcgggcacctggccacagcaggggccagtcagggcaccccgggatagcacgcccaggccctgtgcaaggcctctggcacttaggagaggcttttgcccctttgtcctctgagcagaagggttggcaaagagggaaggggacaggccagttctgcacctggcctttctccagaatgaaggcctccacctcccgcacgtccccacagaaagaaaagtaaactgttttcgcggctgcgcagaaagaagaacatggtatgtgcagtgagtgctgcggaggggcgcagaggcccgcgccctggctggccctgtgcatgcgccttgcgccctgctcccaggtgctcactaacccgtaatctgctgctctgtgtgcatgtgctgcccggcagggctgtcgtgtgcgtgttgggtgggaaggcggaggcggcgcggggcgggctggcctctgagcatctggctgcatttagcacg

SEQ ID NO: 643 - DNA, 502 bp, synthetic construct
  misc_feature 1..502: note = Synthetic
  source 1..502: mol_type = other DNA
gagcctcctgcccctcaccaggccctgttagcatcacctcgggcacctggccacagcaggggccagtcagggcaccccgggatagcacgcccaggccctgtgcaaggcctctggcacttaggagaggcttttgcccctttgtcctctgagcagaagggttggcaaagagggaaggggacaggccagttctgcacctggcctttctccagaatgaaggcctccacctcccgcacgtccccacagaaagaaaagtaaactgttttcgcggctgcgcagaaagaagaacatggtatgtgcagtgagtgctgcggaggggcgcagaggcccgcgccctggctggccctgtgcatgctgccttgcgccctgctcccaggtgccactaacccgtaatctggctctgtgtgcagtgctgcccggcagggctgtcgtgtgcgtgttgggtgggaaggcggaggcggcgcggggcgggctggcctctgagcatctggctgcatttagcacg

SEQ ID NO: 644 - DNA, 503 bp, synthetic construct
  misc_feature 1..503: note = Synthetic
  source 1..503: mol_type = other DNA
gagcctcctgcccctcaccaggccctgttagcatcacctcgggcacctggccacagcaggggccagtcagggcaccccgggatagcacgcccaggccctgtgcaaggcctctggcacttaggagaggcttttgcccctttgtcctctgagcagaagggttggcaaagagggaaggggacaggccagttctgcacctggcctttctccagaatgaaggcctccacctcccgcacgtccccacagaaagaaaagtaaactgttttcgcggctgcgcagaaagaagaacatggtatgtgcagtgagtgctgcggaggggcgcagaggcccgcgccctggctggccctgtgcatgctgccttgcgccctgctcccaggtgccactaacccgtaatctggctctgtgtgcatgtgctgcccggcagggctgtcgtgtgcgtgttgggtgggaaggcggaggcggcgcggggcgggctggcctctgagcatctggctgcatttagcacg

SEQ ID NO: 645 - DNA, 504 bp, synthetic construct
  misc_feature 1..504: note = Synthetic
  source 1..504: mol_type = other DNA
gagcctcctgcccctcaccaggccctgttagcatcacctcgggcacctggccacagcaggggccagtcagggcaccccgggatagcacgcccaggccctgtgcaaggcctctggcacttaggagaggcttttgcccctttgtcctctgagcagaagggttggcaaagagggaaggggacaggccagttctgcacctggcctttctccagaatgaaggcctccacctcccgcacgtccccacagaaagaaaagtaaactgttttcgcggctgcgcagaaagaagaacatggtatgtgcagtgagtgctgcggaggggcgcagaggcccgcgccctggctggccctgtgcatgctgccttgcgccctgctcccaggtgccactaacccgtaatctgctgctctgtgtgcagtgctgcccggcagggctgtcgtgtgcgtgttgggtgggaaggcggaggcggcgcggggcgggctggcctctgagcatctggctgcatttagcacg

SEQ ID NO: 646 - DNA, 505 bp, synthetic construct
  misc_feature 1..505: note = Synthetic
  source 1..505: mol_type = other DNA
gagcctcctgcccctcaccaggccctgttagcatcacctcgggcacctggccacagcaggggccagtcagggcaccccgggatagcacgcccaggccctgtgcaaggcctctggcacttaggagaggcttttgcccctttgtcctctgagcagaagggttggcaaagagggaaggggacaggccagttctgcacctggcctttctccagaatgaaggcctccacctcccgcacgtccccacagaaagaaaagtaaactgttttcgcggctgcgcagaaagaagaacatggtatgtgcagtgagtgctgcggaggggcgcagaggcccgcgccctggctggccctgtgcatgctgccttgcgccctgctcccaggtgccactaacccgtaatctgctgctctgtgtgcatgtgctgcccggcagggctgtcgtgtgcgtgttgggtgggaaggcggaggcggcgcggggcgggctggcctctgagcatctggctgcatttagcacg

SEQ ID NO: 647 - DNA, 503 bp, synthetic construct
  misc_feature 1..503: note = Synthetic
  source 1..503: mol_type = other DNA
gagcctcctgcccctcaccaggccctgttagcatcacctcgggcacctggccacagcaggggccagtcagggcaccccgggatagcacgcccaggccctgtgcaaggcctctggcacttaggagaggcttttgcccctttgtcctctgagcagaagggttggcaaagagggaaggggacaggccagttctgcacctggcctttctccagaatgaaggcctccacctcccgcacgtccccacagaaagaaaagtaaactgttttcgcggctgcgcagaaagaagaacatggtatgtgcagtgagtgctgcggaggggcgcagaggcccgcgccctggctggccctgtgcatgctgccttgcgccctgctcccaggtgctcactaacccgtaatctggctctgtgtgcagtgctgcccggcagggctgtcgtgtgcgtgttgggtgggaaggcggaggcggcgcggggcgggctggcctctgagcatctggctgcatttagcacg

SEQ ID NO: 648 - DNA, 504 bp, synthetic construct
  misc_feature 1..504: note = Synthetic
  source 1..504: mol_type = other DNA
gagcctcctgcccctcaccaggccctgttagcatcacctcgggcacctggccacagcaggggccagtcagggcaccccgggatagcacgcccaggccctgtgcaaggcctctggcacttaggagaggcttttgcccctttgtcctctgagcagaagggttggcaaagagggaaggggacaggccagttctgcacctggcctttctccagaatgaaggcctccacctcccgcacgtccccacagaaagaaaagtaaactgttttcgcggctgcgcagaaagaagaacatggtatgtgcagtgagtgctgcggaggggcgcagaggcccgcgccctggctggccctgtgcatgctgccttgcgccctgctcccaggtgctcactaacccgtaatctggctctgtgtgcatgtgctgcccggcagggctgtcgtgtgcgtgttgggtgggaaggcggaggcggcgcggggcgggctggcctctgagcatctggctgcatttagcacg

SEQ ID NO: 649 - DNA, 505 bp, synthetic construct
  misc_feature 1..505: note = Synthetic
  source 1..505: mol_type = other DNA
gagcctcctgcccctcaccaggccctgttagcatcacctcgggcacctggccacagcaggggccagtcagggcaccccgggatagcacgcccaggccctgtgcaaggcctctggcacttaggagaggcttttgcccctttgtcctctgagcagaagggttggcaaagagggaaggggacaggccagttctgcacctggcctttctccagaatgaaggcctccacctcccgcacgtccccacagaaagaaaagtaaactgttttcgcggctgcgcagaaagaagaacatggtatgtgcagtgagtgctgcggaggggcgcagaggcccgcgccctggctggccctgtgcatgctgccttgcgccctgctcccaggtgctcactaacccgtaatctgctgctctgtgtgcagtgctgcccggcagggctgtcgtgtgcgtgttgggtgggaaggcggaggcggcgcggggcgggctggcctctgagcatctggctgcatttagcacg

SEQ ID NO: 650 - DNA, 506 bp, synthetic construct
  misc_feature 1..506: note = Synthetic
  source 1..506: mol_type = other DNA
gagcctcctgcccctcaccaggccctgttagcatcacctcgggcacctggccacagcaggggccagtcagggcaccccgggatagcacgcccaggccctgtgcaaggcctctggcacttaggagaggcttttgcccctttgtcctctgagcagaagggttggcaaagagggaaggggacaggccagttctgcacctggcctttctccagaatgaaggcctccacctcccgcacgtccccacagaaagaaaagtaaactgttttcgcggctgcgcagaaagaagaacatggtatgtgcagtgagtgctgcggaggggcgcagaggcccgcgccctggctggccctgtgcatgctgccttgcgccctgctcccaggtgctcactaacccgtaatctgctgctctgtgtgcatgtgctgcccggcagggctgtcgtgtgcgtgttgggtgggaaggcggaggcggcgcggggcgggctggcctctgagcatctggctgcatttagcacg

SEQ ID NO: 651 - DNA, 501 bp, synthetic construct
  misc_feature 1..501: note = Synthetic
  source 1..501: mol_type = other DNA
gagcctcctgcccctcaccaggccctgttagcatcacctcgggcacctggccacagcaggggccagtcagggcaccccgggatagcacgcccaggccctgtgcaaggcctctggcacttaggagaggcttttgcccctttgtcctctgagcagaagggttggcaaagagggaaggggacaggccagttctgcacctggcctttctccagaatgaaggcctccacctcccgcacgtccccacagaaagaaaagtaaactgttttcgcggctgcgcagaaagaagaacatggtacgagcagtgagtgctgcggaggggcgcagaggcccgcgccctggctggccctgtgcatgcgccttgcgccctgctcccaggtgccactaacccgtaatctggctctgtgtgcagtgctgcccggcagggctgtcgtgtgcgtgttgggtgggaaggcggaggcggcgcggggcgggctggcctctgagcatctggctgcatttagcacg

SEQ ID NO: 652 - DNA, 502 bp, synthetic construct
  misc_feature 1..502: note = Synthetic
  source 1..502: mol_type = other DNA
gagcctcctgcccctcaccaggccctgttagcatcacctcgggcacctggccacagcaggggccagtcagggcaccccgggatagcacgcccaggccctgtgcaaggcctctggcacttaggagaggcttttgcccctttgtcctctgagcagaagggttggcaaagagggaaggggacaggccagttctgcacctggcctttctccagaatgaaggcctccacctcccgcacgtccccacagaaagaaaagtaaactgttttcgcggctgcgcagaaagaagaacatggtacgagcagtgagtgctgcggaggggcgcagaggcccgcgccctggctggccctgtgcatgcgccttgcgccctgctcccaggtgccactaacccgtaatctggctctgtgtgcatgtgctgcccggcagggctgtcgtgtgcgtgttgggtgggaaggcggaggcggcgcggggcgggctggcctctgagcatctggctgcatttagcacg

SEQ ID NO: 653 - DNA, 503 bp, synthetic construct
  misc_feature 1..503: note = Synthetic
  source 1..503: mol_type = other DNA
gagcctcctgcccctcaccaggccctgttagcatcacctcgggcacctggccacagcaggggccagtcagggcaccccgggatagcacgcccaggccctgtgcaaggcctctggcacttaggagaggcttttgcccctttgtcctctgagcagaagggttggcaaagagggaaggggacaggccagttctgcacctggcctttctccagaatgaaggcctccacctcccgcacgtccccacagaaagaaaagtaaactgttttcgcggctgcgcagaaagaagaacatggtacgagcagtgagtgctgcggaggggcgcagaggcccgcgccctggctggccctgtgcatgcgccttgcgccctgctcccaggtgccactaacccgtaatctgctgctctgtgtgcagtgctgcccggcagggctgtcgtgtgcgtgttgggtgggaaggcggaggcggcgcggggcgggctggcctctgagcatctggctgcatttagcacg

SEQ ID NO: 654 - DNA, 504 bp, synthetic construct
  misc_feature 1..504: note = Synthetic
  source 1..504: mol_type = other DNA
gagcctcctgcccctcaccaggccctgttagcatcacctcgggcacctggccacagcaggggccagtcagggcaccccgggatagcacgcccaggccctgtgcaaggcctctggcacttaggagaggcttttgcccctttgtcctctgagcagaagggttggcaaagagggaaggggacaggccagttctgcacctggcctttctccagaatgaaggcctccacctcccgcacgtccccacagaaagaaaagtaaactgttttcgcggctgcgcagaaagaagaacatggtacgagcagtgagtgctgcggaggggcgcagaggcccgcgccctggctggccctgtgcatgcgccttgcgccctgctcccaggtgccactaacccgtaatctgctgctctgtgtgcatgtgctgcccggcagggctgtcgtgtgcgtgttgggtgggaaggcggaggcggcgcggggcgggctggcctctgagcatctggctgcatttagcacg

SEQ ID NO: 655 - DNA, 502 bp, synthetic construct
  misc_feature 1..502: note = Synthetic
  source 1..502: mol_type = other DNA
gagcctcctgcccctcaccaggccctgttagcatcacctcgggcacctggccacagcaggggccagtcagggcaccccgggatagcacgcccaggccctgtgcaaggcctctggcacttaggagaggcttttgcccctttgtcctctgagcagaagggttggcaaagagggaaggggacaggccagttctgcacctggcctttctccagaatgaaggcctccacctcccgcacgtccccacagaaagaaaagtaaactgttttcgcggctgcgcagaaagaagaacatggtacgagcagtgagtgctgcggaggggcgcagaggcccgcgccctggctggccctgtgcatgcgccttgcgccctgctcccaggtgctcactaacccgtaatctggctctgtgtgcagtgctgcccggcagggctgtcgtgtgcgtgttgggtgggaaggcggaggcggcgcggggcgggctggcctctgagcatctggctgcatttagcacg

SEQ ID NO: 656 - DNA, 503 bp, synthetic construct
  misc_feature 1..503: note = Synthetic
  source 1..503: mol_type = other DNA
gagcctcctgcccctcaccaggccctgttagcatcacctcgggcacctggccacagcaggggccagtcagggcaccccgggatagcacgcccaggccctgtgcaaggcctctggcacttaggagaggcttttgcccctttgtcctctgagcagaagggttggcaaagagggaaggggacaggccagttctgcacctggcctttctccagaatgaaggcctccacctcccgcacgtccccacagaaagaaaagtaaactgttttcgcggctgcgcagaaagaagaacatggtacgagcagtgagtgctgcggaggggcgcagaggcccgcgccctggctggccctgtgcatgcgccttgcgccctgctcccaggtgctcactaacccgtaatctggctctgtgtgcatgtgctgcccggcagggctgtcgtgtgcgtgttgggtgggaaggcggaggcggcgcggggcgggctggcctctgagcatctggctgcatttagcacg

SEQ ID NO: 657 - DNA, 504 bp, synthetic construct
  misc_feature 1..504: note = Synthetic
  source 1..504: mol_type = other DNA
gagcctcctgcccctcaccaggccctgttagcatcacctcgggcacctggccacagcaggggccagtcagggcaccccgggatagcacgcccaggccctgtgcaaggcctctggcacttaggagaggcttttgcccctttgtcctctgagcagaagggttggcaaagagggaaggggacaggccagttctgcacctggcctttctccagaatgaaggcctccacctcccgcacgtccccacagaaagaaaagtaaactgttttcgcggctgcgcagaaagaagaacatggtacgagcagtgagtgctgcggaggggcgcagaggcccgcgccctggctggccctgtgcatgcgccttgcgccctgctcccaggtgctcactaacccgtaatctgctgctctgtgtgcagtgctgcccggcagggctgtcgtgtgcgtgttgggtgggaaggcggaggcggcgcggggcgggctggcctctgagcatctggctgcatttagcacg

SEQ ID NO: 658 - DNA, 505 bp, synthetic construct
  misc_feature 1..505: note = Synthetic
  source 1..505: mol_type = other DNA
gagcctcctgcccctcaccaggccctgttagcatcacctcgggcacctggccacagcaggggccagtcagggcaccccgggatagcacgcccaggccctgtgcaaggcctctggcacttaggagaggcttttgcccctttgtcctctgagcagaagggttggcaaagagggaaggggacaggccagttctgcacctggcctttctccagaatgaaggcctccacctcccgcacgtccccacagaaagaaaagtaaactgttttcgcggctgcgcagaaagaagaacatggtacgagcagtgagtgctgcggaggggcgcagaggcccgcgccctggctggccctgtgcatgcgccttgcgccctgctcccaggtgctcactaacccgtaatctgctgctctgtgtgcatgtgctgcccggcagggctgtcgtgtgcgtgttgggtgggaaggcggaggcggcgcggggcgggctggcctctgagcatctggctgcatttagcacg

SEQ ID NO: 659 - DNA, 502 bp, synthetic construct
  misc_feature 1..502: note = Synthetic
  source 1..502: mol_type = other DNA
gagcctcctgcccctcaccaggccctgttagcatcacctcgggcacctggccacagcaggggccagtcagggcaccccgggatagcacgcccaggccctgtgcaaggcctctggcacttaggagaggcttttgcccctttgtcctctgagcagaagggttggcaaagagggaaggggacaggccagttctgcacctggcctttctccagaatgaaggcctccacctcccgcacgtccccacagaaagaaaagtaaactgttttcgcggctgcgcagaaagaagaacatggtacgagcagtgagtgctgcggaggggcgcagaggcccgcgccctggctggccctgtgcatgctgccttgcgccctgctcccaggtgccactaacccgtaatctggctctgtgtgcagtgctgcccggcagggctgtcgtgtgcgtgttgggtgggaaggcggaggcggcgcggggcgggctggcctctgagcatctggctgcatttagcacg

SEQ ID NO: 660 - DNA, 503 bp, synthetic construct
  misc_feature 1..503: note = Synthetic
  source 1..503: mol_type = other DNA
gagcctcctgcccctcaccaggccctgttagcatcacctcgggcacctggccacagcaggggccagtcagggcaccccgggatagcacgcccaggccctgtgcaaggcctctggcacttaggagaggcttttgcccctttgtcctctgagcagaagggttggcaaagagggaaggggacaggccagttctgcacctggcctttctccagaatgaaggcctccacctcccgcacgtccccacagaaagaaaagtaaactgttttcgcggctgcgcagaaagaagaacatggtacgagcagtgagtgctgcggaggggcgcagaggcccgcgccctggctggccctgtgcatgctgccttgcgccctgctcccaggtgccactaacccgtaatctggctctgtgtgcatgtgctgcccggcagggctgtcgtgtgcgtgttgggtgggaaggcggaggcggcgcggggcgggctggcctctgagcatctggctgcatttagcacg

SEQ ID NO: 661 - DNA, 504 bp, synthetic construct
  misc_feature 1..504: note = Synthetic
  source 1..504: mol_type = other DNA
gagcctcctgcccctcaccaggccctgttagcatcacctcgggcacctggccacagcaggggccagtcagggcaccccgggatagcacgcccaggccctgtgcaaggcctctggcacttaggagaggcttttgcccctttgtcctctgagcagaagggttggcaaagagggaaggggacaggccagttctgcacctggcctttctccagaatgaaggcctccacctcccgcacgtccccacagaaagaaaagtaaactgttttcgcggctgcgcagaaagaagaacatggtacgagcagtgagtgctgcggaggggcgcagaggcccgcgccctggctggccctgtgcatgctgccttgcgccctgctcccaggtgccactaacccgtaatctgctgctctgtgtgcagtgctgcccggcagggctgtcgtgtgcgtgttgggtgggaaggcggaggcggcgcggggcgggctggcctctgagcatctggctgcatttagcacg

SEQ ID NO: 662 - DNA, 505 bp, synthetic construct
  misc_feature 1..505: note = Synthetic
  source 1..505: mol_type = other DNA
gagcctcctgcccctcaccaggccctgttagcatcacctcgggcacctggccacagcaggggccagtcagggcaccccgggatagcacgcccaggccctgtgcaaggcctctggcacttaggagaggcttttgcccctttgtcctctgagcagaagggttggcaaagagggaaggggacaggccagttctgcacctggcctttctccagaatgaaggcctccacctcccgcacgtccccacagaaagaaaagtaaactgttttcgcggctgcgcagaaagaagaacatggtacgagcagtgagtgctgcggaggggcgcagaggcccgcgccctggctggccctgtgcatgctgccttgcgccctgctcccaggtgccactaacccgtaatctgctgctctgtgtgcatgtgctgcccggcagggctgtcgtgtgcgtgttgggtgggaaggcggaggcggcgcggggcgggctggcctctgagcatctggctgcatttagcacg

SEQ ID NO: 663 - DNA, 503 bp, synthetic construct
  misc_feature 1..503: note = Synthetic
  source 1..503: mol_type = other DNA
gagcctcctgcccctcaccaggccctgttagcatcacctcgggcacctggccacagcaggggccagtcagggcaccccgggatagcacgcccaggccctgtgcaaggcctctggcacttaggagaggcttttgcccctttgtcctctgagcagaagggttggcaaagagggaaggggacaggccagttctgcacctggcctttctccagaatgaaggcctccacctcccgcacgtccccacagaaagaaaagtaaactgttttcgcggctgcgcagaaagaagaacatggtacgagcagtgagtgctgcggaggggcgcagaggcccgcgccctggctggccctgtgcatgctgccttgcgccctgctcccaggtgctcactaacccgtaatctggctctgtgtgcagtgctgcccggcagggctgtcgtgtgcgtgttgggtgggaaggcggaggcggcgcggggcgggctggcctctgagcatctggctgcatttagcacg

SEQ ID NO: 664 - DNA, 504 bp, synthetic construct
  misc_feature 1..504: note = Synthetic
  source 1..504: mol_type = other DNA
gagcctcctgcccctcaccaggccctgttagcatcacctcgggcacctggccacagcaggggccagtcagggcaccccgggatagcacgcccaggccctgtgcaaggcctctggcacttaggagaggcttttgcccctttgtcctctgagcagaagggttggcaaagagggaaggggacaggccagttctgcacctggcctttctccagaatgaaggcctccacctcccgcacgtccccacagaaagaaaagtaaactgttttcgcggctgcgcagaaagaagaacatggtacgagcagtgagtgctgcggaggggcgcagaggcccgcgccctggctggccctgtgcatgctgccttgcgccctgctcccaggtgctcactaacccgtaatctggctctgtgtgcatgtgctgcccggcagggctgtcgtgtgcgtgttgggtgggaaggcggaggcggcgcggggcgggctggcctctgagcatctggctgcatttagcacg

SEQ ID NO: 665 - DNA, 505 bp, synthetic construct
  misc_feature 1..505: note = Synthetic
  source 1..505: mol_type = other DNA
gagcctcctgcccctcaccaggccctgttagcatcacctcgggcacctggccacagcaggggccagtcagggcaccccgggatagcacgcccaggccctgtgcaaggcctctggcacttaggagaggcttttgcccctttgtcctctgagcagaagggttggcaaagagggaaggggacaggccagttctgcacctggcctttctccagaatgaaggcctccacctcccgcacgtccccacagaaagaaaagtaaactgttttcgcggctgcgcagaaagaagaacatggtacgagcagtgagtgctgcggaggggcgcagaggcccgcgccctggctggccctgtgcatgctgccttgcgccctgctcccaggtgctcactaacccgtaatctgctgctctgtgtgcagtgctgcccggcagggctgtcgtgtgcgtgttgggtgggaaggcggaggcggcgcggggcgggctggcctctgagcatctggctgcatttagcacg

SEQ ID NO: 666 - DNA, 506 bp, synthetic construct
  misc_feature 1..506: note = Synthetic
  source 1..506: mol_type = other DNA
gagcctcctgcccctcaccaggccctgttagcatcacctcgggcacctggccacagcaggggccagtcagggcaccccgggatagcacgcccaggccctgtgcaaggcctctggcacttaggagaggcttttgcccctttgtcctctgagcagaagggttggcaaagagggaaggggacaggccagttctgcacctggcctttctccagaatgaaggcctccacctcccgcacgtccccacagaaagaaaagtaaactgttttcgcggctgcgcagaaagaagaacatggtacgagcagtgagtgctgcggaggggcgcagaggcccgcgccctggctggccctgtgcatgctgccttgcgccctgctcccaggtgctcactaacccgtaatctgctgctctgtgtgcatgtgctgcccggcagggctgtcgtgtgcgtgttgggtgggaaggcggaggcggcgcggggcgggctggcctctgagcatctggctgcatttagcacg

SEQ ID NO: 667 - DNA, 501 bp, synthetic construct
  misc_feature 1..501: note = Synthetic
  source 1..501: mol_type = other DNA
gagcctcctgcccctcaccaggccctgttagcatcacctcgggcacctggccacagcaggggccagtcagggcaccccgggatagcacgcccaggccctgtgcaaggcctctggcacttaggagaggcttttgcccctttgtcctctgagcagaagggttggcaaagagggaaggggacaggccagttctgcacctggcctttctccagaatgaaggcctccacctcccgcacgtccccacagaaagaaaagtaaactgttttcgcggctgcgcagaaagaagaacatggttcgtgcagtgagtgctgcggaggggcgcagaggcccgcgccctggctggccctgtgcatgcgccttgcgccctgctcccaggtgccactaacccgtaatctggctctgtgtgcagtgctgcccggcagggctgtcgtgtgcgtgttgggtgggaaggcggaggcggcgcggggcgggctggcctctgagcatctggctgcatttagcacg

SEQ ID NO: 668 - DNA, 502 bp, synthetic construct
  misc_feature 1..502: note = Synthetic
  source 1..502: mol_type = other DNA
gagcctcctgcccctcaccaggccctgttagcatcacctcgggcacctggccacagcaggggccagtcagggcaccccgggatagcacgcccaggccctgtgcaaggcctctggcacttaggagaggcttttgcccctttgtcctctgagcagaagggttggcaaagagggaaggggacaggccagttctgcacctggcctttctccagaatgaaggcctccacctcccgcacgtccccacagaaagaaaagtaaactgttttcgcggctgcgcagaaagaagaacatggttcgtgcagtgagtgctgcggaggggcgcagaggcccgcgccctggctggccctgtgcatgcgccttgcgccctgctcccaggtgccactaacccgtaatctggctctgtgtgcatgtgctgcccggcagggctgtcgtgtgcgtgttgggtgggaaggcggaggcggcgcggggcgggctggcctctgagcatctggctgcatttagcacg

SEQ ID NO: 669 - DNA, 503 bp, synthetic construct
  misc_feature 1..503: note = Synthetic
  source 1..503: mol_type = other DNA
gagcctcctgcccctcaccaggccctgttagcatcacctcgggcacctggccacagcaggggccagtcagggcaccccgggatagcacgcccaggccctgtgcaaggcctctggcacttaggagaggcttttgcccctttgtcctctgagcagaagggttggcaaagagggaaggggacaggccagttctgcacctggcctttctccagaatgaaggcctccacctcccgcacgtccccacagaaagaaaagtaaactgttttcgcggctgcgcagaaagaagaacatggttcgtgcagtgagtgctgcggaggggcgcagaggcccgcgccctggctggccctgtgcatgcgccttgcgccctgctcccaggtgccactaacccgtaatctgctgctctgtgtgcagtgctgcccggcagggctgtcgtgtgcgtgttgggtgggaaggcggaggcggcgcggggcgggctggcctctgagcatctggctgcatttagcacg

SEQ ID NO: 670 - DNA, 504 bp, synthetic construct
  misc_feature 1..504: note = Synthetic
  source 1..504: mol_type = other DNA
gagcctcctgcccctcaccaggccctgttagcatcacctcgggcacctggccacagcaggggccagtcagggcaccccgggatagcacgcccaggccctgtgcaaggcctctggcacttaggagaggcttttgcccctttgtcctctgagcagaagggttggcaaagagggaaggggacaggccagttctgcacctggcctttctccagaatgaaggcctccacctcccgcacgtccccacagaaagaaaagtaaactgttttcgcggctgcgcagaaagaagaacatggttcgtgcagtgagtgctgcggaggggcgcagaggcccgcgccctggctggccctgtgcatgcgccttgcgccctgctcccaggtgccactaacccgtaatctgctgctctgtgtgcatgtgctgcccggcagggctgtcgtgtgcgtgttgggtgggaaggcggaggcggcgcggggcgggctggcctctgagcatctggctgcatttagcacg

SEQ ID NO: 671 - DNA, 502 bp, synthetic construct
  misc_feature 1..502: note = Synthetic
  source 1..502: mol_type = other DNA
gagcctcctgcccctcaccaggccctgttagcatcacctcgggcacctggccacagcaggggccagtcagggcaccccgggatagcacgcccaggccctgtgcaaggcctctggcacttaggagaggcttttgcccctttgtcctctgagcagaagggttggcaaagagggaaggggacaggccagttctgcacctggcctttctccagaatgaaggcctccacctcccgcacgtccccacagaaagaaaagtaaactgttttcgcggctgcgcagaaagaagaacatggttcgtgcagtgagtgctgcggaggggcgcagaggcccgcgccctggctggccctgtgcatgcgccttgcgccctgctcccaggtgctcactaacccgtaatctggctctgtgtgcagtgctgcccggcagggctgtcgtgtgcgtgttgggtgggaaggcggaggcggcgcggggcgggctggcctctgagcatctggctgcatttagcacg

SEQ ID NO: 672 - DNA, 503 bp, synthetic construct
  misc_feature 1..503: note = Synthetic
  source 1..503: mol_type = other DNA
gagcctcctgcccctcaccaggccctgttagcatcacctcgggcacctggccacagcaggggccagtcagggcaccccgggatagcacgcccaggccctgtgcaaggcctctggcacttaggagaggcttttgcccctttgtcctctgagcagaagggttggcaaagagggaaggggacaggccagttctgcacctggcctttctccagaatgaaggcctccacctcccgcacgtccccacagaaagaaaagtaaactgttttcgcggctgcgcagaaagaagaacatggttcgtgcagtgagtgctgcggaggggcgcagaggcccgcgccctggctggccctgtgcatgcgccttgcgccctgctcccaggtgctcactaacccgtaatctggctctgtgtgcatgtgctgcccggcagggctgtcgtgtgcgtgttgggtgggaaggcggaggcggcgcggggcgggctggcctctgagcatctggctgcatttagcacg

SEQ ID NO: 673 - DNA, 504 bp, synthetic construct
  misc_feature 1..504: note = Synthetic
  source 1..504: mol_type = other DNA
gagcctcctgcccctcaccaggccctgttagcatcacctcgggcacctggccacagcaggggccagtcagggcaccccgggatagcacgcccaggccctgtgcaaggcctctggcacttaggagaggcttttgcccctttgtcctctgagcagaagggttggcaaagagggaaggggacaggccagttctgcacctggcctttctccagaatgaaggcctccacctcccgcacgtccccacagaaagaaaagtaaactgttttcgcggctgcgcagaaagaagaacatggttcgtgcagtgagtgctgcggaggggcgcagaggcccgcgccctggctggccctgtgcatgcgccttgcgccctgctcccaggtgctcactaacccgtaatctgctgctctgtgtgcagtgctgcccggcagggctgtcgtgtgcgtgttgggtgggaaggcggaggcggcgcggggcgggctggcctctgagcatctggctgcatttagcacg

SEQ ID NO: 674 - DNA, 505 bp, synthetic construct
  misc_feature 1..505: note = Synthetic
  source 1..505: mol_type = other DNA
gagcctcctgcccctcaccaggccctgttagcatcacctcgggcacctggccacagcaggggccagtcagggcaccccgggatagcacgcccaggccctgtgcaaggcctctggcacttaggagaggcttttgcccctttgtcctctgagcagaagggttggcaaagagggaaggggacaggccagttctgcacctggcctttctccagaatgaaggcctccacctcccgcacgtccccacagaaagaaaagtaaactgttttcgcggctgcgcagaaagaagaacatggttcgtgcagtgagtgctgcggaggggcgcagaggcccgcgccctggctggccctgtgcatgcgccttgcgccctgctcccaggtgctcactaacccgtaatctgctgctctgtgtgcatgtgctgcccggcagggctgtcgtgtgcgtgttgggtgggaaggcggaggcggcgcggggcgggctggcctctgagcatctggctgcatttagcacg

SEQ ID NO: 675 - DNA, 502 bp, synthetic construct
  misc_feature 1..502: note = Synthetic
  source 1..502: mol_type = other DNA
gagcctcctgcccctcaccaggccctgttagcatcacctcgggcacctggccacagcaggggccagtcagggcaccccgggatagcacgcccaggccctgtgcaaggcctctggcacttaggagaggcttttgcccctttgtcctctgagcagaagggttggcaaagagggaaggggacaggccagttctgcacctggcctttctccagaatgaaggcctccacctcccgcacgtccccacagaaagaaaagtaaactgttttcgcggctgcgcagaaagaagaacatggttcgtgcagtgagtgctgcggaggggcgcagaggcccgcgccctggctggccctgtgcatgctgccttgcgccctgctcccaggtgccactaacccgtaatctggctctgtgtgcagtgctgcccggcagggctgtcgtgtgcgtgttgggtgggaaggcggaggcggcgcggggcgggctggcctctgagcatctggctgcatttagcacg

SEQ ID NO: 676 - DNA, 503 bp, synthetic construct
  misc_feature 1..503: note = Synthetic
  source 1..503: mol_type = other DNA
gagcctcctgcccctcaccaggccctgttagcatcacctcgggcacctggccacagcaggggccagtcagggcaccccgggatagcacgcccaggccctgtgcaaggcctctggcacttaggagaggcttttgcccctttgtcctctgagcagaagggttggcaaagagggaaggggacaggccagttctgcacctggcctttctccagaatgaaggcctccacctcccgcacgtccccacagaaagaaaagtaaactgttttcgcggctgcgcagaaagaagaacatggttcgtgcagtgagtgctgcggaggggcgcagaggcccgcgccctggctggccctgtgcatgctgccttgcgccctgctcccaggtgccactaacccgtaatctggctctgtgtgcatgtgctgcccggcagggctgtcgtgtgcgtgttgggtgggaaggcggaggcggcgcggggcgggctggcctctgagcatctggctgcatttagcacg

SEQ ID NO: 677 - DNA, 504 bp, synthetic construct
  misc_feature 1..504: note = Synthetic
  source 1..504: mol_type = other DNA
gagcctcctgcccctcaccaggccctgttagcatcacctcgggcacctggccacagcaggggccagtcagggcaccccgggatagcacgcccaggccctgtgcaaggcctctggcacttaggagaggcttttgcccctttgtcctctgagcagaagggttggcaaagagggaaggggacaggccagttctgcacctggcctttctccagaatgaaggcctccacctcccgcacgtccccacagaaagaaaagtaaactgttttcgcggctgcgcagaaagaagaacatggttcgtgcagtgagtgctgcggaggggcgcagaggcccgcgccctggctggccctgtgcatgctgccttgcgccctgctcccaggtgccactaacccgtaatctgctgctctgtgtgcagtgctgcccggcagggctgtcgtgtgcgtgttgggtgggaaggcggaggcggcgcggggcgggctggcctctgagcatctggctgcatttagcacg

SEQ ID NO: 678 - DNA, 505 bp, synthetic construct
  misc_feature 1..505: note = Synthetic
  source 1..505: mol_type = other DNA
gagcctcctgcccctcaccaggccctgttagcatcacctcgggcacctggccacagcaggggccagtcagggcaccccgggatagcacgcccaggccctgtgcaaggcctctggcacttaggagaggcttttgcccctttgtcctctgagcagaagggttggcaaagagggaaggggacaggccagttctgcacctggcctttctccagaatgaaggcctccacctcccgcacgtccccacagaaagaaaagtaaactgttttcgcggctgcgcagaaagaagaacatggttcgtgcagtgagtgctgcggaggggcgcagaggcccgcgccctggctggccctgtgcatgctgccttgcgccctgctcccaggtgccactaacccgtaatctgctgctctgtgtgcatgtgctgcccggcagggctgtcgtgtgcgtgttgggtgggaaggcggaggcggcgcggggcgggctggcctctgagcatctggctgcatttagcacg

SEQ ID NO: 679 - DNA, 503 bp, synthetic construct
  misc_feature 1..503: note = Synthetic
  source 1..503: mol_type = other DNA
gagcctcctgcccctcaccaggccctgttagcatcacctcgggcacctggccacagcaggggccagtcagggcaccccgggatagcacgcccaggccctgtgcaaggcctctggcacttaggagaggcttttgcccctttgtcctctgagcagaagggttggcaaagagggaaggggacaggccagttctgcacctggcctttctccagaatgaaggcctccacctcccgcacgtccccacagaaagaaaagtaaactgttttcgcggctgcgcagaaagaagaacatggttcgtgcagtgagtgctgcggaggggcgcagaggcccgcgccctggctggccctgtgcatgctgccttgcgccctgctcccaggtgctcactaacccgtaatctggctctgtgtgcagtgctgcccggcagggctgtcgtgtgcgtgttgggtgggaaggcggaggcggcgcggggcgggctggcctctgagcatctggctgcatttagcacg

SEQ ID NO: 680 - DNA, 504 bp, synthetic construct
  misc_feature 1..504: note = Synthetic
  source 1..504: mol_type = other DNA
gagcctcctgcccctcaccaggccctgttagcatcacctcgggcacctggccacagcaggggccagtcagggcaccccgggatagcacgcccaggccctgtgcaaggcctctggcacttaggagaggcttttgcccctttgtcctctgagcagaagggttggcaaagagggaaggggacaggccagttctgcacctggcctttctccagaatgaaggcctccacctcccgcacgtccccacagaaagaaaagtaaactgttttcgcggctgcgcagaaagaagaacatggttcgtgcagtgagtgctgcggaggggcgcagaggcccgcgccctggctggccctgtgcatgctgccttgcgccctgctcccaggtgctcactaacccgtaatctggctctgtgtgcatgtgctgcccggcagggctgtcgtgtgcgtgttgggtgggaaggcggaggcggcgcggggcgggctggcctctgagcatctggctgcatttagcacg

SEQ ID NO: 681 - DNA, 505 bp, synthetic construct
  misc_feature 1..505: note = Synthetic
  source 1..505: mol_type = other DNA
gagcctcctgcccctcaccaggccctgttagcatcacctcgggcacctggccacagcaggggccagtcagggcaccccgggatagcacgcccaggccctgtgcaaggcctctggcacttaggagaggcttttgcccctttgtcctctgagcagaagggttggcaaagagggaaggggacaggccagttctgcacctggcctttctccagaatgaaggcctccacctcccgcacgtccccacagaaagaaaagtaaactgttttcgcggctgcgcagaaagaagaacatggttcgtgcagtgagtgctgcggaggggcgcagaggcccgcgccctggctggccctgtgcatgctgccttgcgccctgctcccaggtgctcactaacccgtaatctgctgctctgtgtgcagtgctgcccggcagggctgtcgtgtgcgtgttgggtgggaaggcggaggcggcgcggggcgggctggcctctgagcatctggctgcatttagcacg

SEQ ID NO: 682 - DNA, 506 bp, synthetic construct
  misc_feature 1..506: note = Synthetic
  source 1..506: mol_type = other DNA
gagcctcctgcccctcaccaggccctgttagcatcacctcgggcacctggccacagcaggggccagtcagggcaccccgggatagcacgcccaggccctgtgcaaggcctctggcacttaggagaggcttttgcccctttgtcctctgagcagaagggttggcaaagagggaaggggacaggccagttctgcacctggcctttctccagaatgaaggcctccacctcccgcacgtccccacagaaagaaaagtaaactgttttcgcggctgcgcagaaagaagaacatggttcgtgcagtgagtgctgcggaggggcgcagaggcccgcgccctggctggccctgtgcatgctgccttgcgccctgctcccaggtgctcactaacccgtaatctgctgctctgtgtgcatgtgctgcccggcagggctgtcgtgtgcgtgttgggtgggaaggcggaggcggcgcggggcgggctggcctctgagcatctggctgcatttagcacg

SEQ ID NO: 683 - DNA, 501 bp, synthetic construct
  misc_feature 1..501: note = Synthetic
  source 1..501: mol_type = other DNA
gagcctcctgcccctcaccaggccctgttagcatcacctcgggcacctggccacagcaggggccagtcagggcaccccgggatagcacgcccaggccctgtgcaaggcctctggcacttaggagaggcttttgcccctttgtcctctgagcagaagggttggcaaagagggaaggggacaggccagttctgcacctggcctttctccagaatgaaggcctccacctcccgtccgcacccacagaaagaaaagtaaactgttttcgcggctgcgcagaaagaagaacatggtacgtgcagtgagtgctgcggaggggcgcagaggcccgcgccctggctggccctgtgcatgcgccttgcgccctgctcccaggtgccactaacccgtaatctggctctgtgtgcagtgctgcccggcagggctgtcgtgtgcgtgttgggtgggaaggcggaggcggcgcggggcgggctggcctctgagcatctggctgcatttagcacg

SEQ ID NO: 684 - DNA, 502 bp, synthetic construct
  misc_feature 1..502: note = Synthetic
  source 1..502: mol_type = other DNA
gagcctcctgcccctcaccaggccctgttagcatcacctcgggcacctggccacagcaggggccagtcagggcaccccgggatagcacgcccaggccctgtgcaaggcctctggcacttaggagaggcttttgcccctttgtcctctgagcagaagggttggcaaagagggaaggggacaggccagttctgcacctggcctttctccagaatgaaggcctccacctcccgtccgcacccacagaaagaaaagtaaactgttttcgcggctgcgcagaaagaagaacatggtacgtgcagtgagtgctgcggaggggcgcagaggcccgcgccctggctggccctgtgcatgcgccttgcgccctgctcccaggtgccactaacccgtaatctggctctgtgtgcatgtgctgcccggcagggctgtcgtgtgcgtgttgggtgggaaggcggaggcggcgcggggcgggctggcctctgagcatctggctgcatttagcacg

SEQ ID NO: 685 - DNA, 503 bp, synthetic construct
  misc_feature 1..503: note = Synthetic
  source 1..503: mol_type = other DNA
gagcctcctgcccctcaccaggccctgttagcatcacctcgggcacctggccacagcaggggccagtcagggcaccccgggatagcacgcccaggccctgtgcaaggcctctggcacttaggagaggcttttgcccctttgtcctctgagcagaagggttggcaaagagggaaggggacaggccagttctgcacctggcctttctccagaatgaaggcctccacctcccgtccgcacccacagaaagaaaagtaaactgttttcgcggctgcgcagaaagaagaacatggtacgtgcagtgagtgctgcggaggggcgcagaggcccgcgccctggctggccctgtgcatgcgccttgcgccctgctcccaggtgccactaacccgtaatctgctgctctgtgtgcagtgctgcccggcagggctgtcgtgtgcgtgttgggtgggaaggcggaggcggcgcggggcgggctggcctctgagcatctggctgcatttagcacg

SEQ ID NO: 686 - DNA, 504 bp, synthetic construct
  misc_feature 1..504: note = Synthetic
  source 1..504: mol_type = other DNA
gagcctcctgcccctcaccaggccctgttagcatcacctcgggcacctggccacagcaggggccagtcagggcaccccgggatagcacgcccaggccctgtgcaaggcctctggcacttaggagaggcttttgcccctttgtcctctgagcagaagggttggcaaagagggaaggggacaggccagttctgcacctggcctttctccagaatgaaggcctccacctcccgtccgcacccacagaaagaaaagtaaactgttttcgcggctgcgcagaaagaagaacatggtacgtgcagtgagtgctgcggaggggcgcagaggcccgcgccctggctggccctgtgcatgcgccttgcgccctgctcccaggtgccactaacccgtaatctgctgctctgtgtgcatgtgctgcccggcagggctgtcgtgtgcgtgttgggtgggaaggcggaggcggcgcggggcgggctggcctctgagcatctggctgcatttagcacg

SEQ ID NO: 687 - DNA, 502 bp, synthetic construct
  misc_feature 1..502: note = Synthetic
  source 1..502: mol_type = other DNA
gagcctcctgcccctcaccaggccctgttagcatcacctcgggcacctggccacagcaggggccagtcagggcaccccgggatagcacgcccaggccctgtgcaaggcctctggcacttaggagaggcttttgcccctttgtcctctgagcagaagggttggcaaagagggaaggggacaggccagttctgcacctggcctttctccagaatgaaggcctccacctcccgtccgcacccacagaaagaaaagtaaactgttttcgcggctgcgcagaaagaagaacatggtacgtgcagtgagtgctgcggaggggcgcagaggcccgcgccctggctggccctgtgcatgcgccttgcgccctgctcccaggtgctcactaacccgtaatctggctctgtgtgcagtgctgcccggcagggctgtcgtgtgcgtgttgggtgggaaggcggaggcggcgcggggcgggctggcctctgagcatctggctgcatttagcacg

SEQ ID NO: 688 - DNA, 503 bp, synthetic construct
  misc_feature 1..503: note = Synthetic
  source 1..503: mol_type = other DNA
gagcctcctgcccctcaccaggccctgttagcatcacctcgggcacctggccacagcaggggccagtcagggcaccccgggatagcacgcccaggccctgtgcaaggcctctggcacttaggagaggcttttgcccctttgtcctctgagcagaagggttggcaaagagggaaggggacaggccagttctgcacctggcctttctccagaatgaaggcctccacctcccgtccgcacccacagaaagaaaagtaaactgttttcgcggctgcgcagaaagaagaacatggtacgtgcagtgagtgctgcggaggggcgcagaggcccgcgccctggctggccctgtgcatgcgccttgcgccctgctcccaggtgctcactaacccgtaatctggctctgtgtgcatgtgctgcccggcagggctgtcgtgtgcgtgttgggtgggaaggcggaggcggcgcggggcgggctggcctctgagcatctggctgcatttagcacg

SEQ ID NO: 689 - DNA, 504 bp, synthetic construct
  misc_feature 1..504: note = Synthetic
  source 1..504: mol_type = other DNA
gagcctcctgcccctcaccaggccctgttagcatcacctcgggcacctggccacagcaggggccagtcagggcaccccgggatagcacgcccaggccctgtgcaaggcctctggcacttaggagaggcttttgcccctttgtcctctgagcagaagggttggcaaagagggaaggggacaggccagttctgcacctggcctttctccagaatgaaggcctccacctcccgtccgcacccacagaaagaaaagtaaactgttttcgcggctgcgcagaaagaagaacatggtacgtgcagtgagtgctgcggaggggcgcagaggcccgcgccctggctggccctgtgcatgcgccttgcgccctgctcccaggtgctcactaacccgtaatctgctgctctgtgtgcagtgctgcccggcagggctgtcgtgtgcgtgttgggtgggaaggcggaggcggcgcggggcgggctggcctctgagcatctggctgcatttagcacg

SEQ ID NO: 690 - DNA, 505 bp, synthetic construct
  misc_feature 1..505: note = Synthetic
  source 1..505: mol_type = other DNA
gagcctcctgcccctcaccaggccctgttagcatcacctcgggcacctggccacagcaggggccagtcagggcaccccgggatagcacgcccaggccctgtgcaaggcctctggcacttaggagaggcttttgcccctttgtcctctgagcagaagggttggcaaagagggaaggggacaggccagttctgcacctggcctttctccagaatgaaggcctccacctcccgtccgcacccacagaaagaaaagtaaactgttttcgcggctgcgcagaaagaagaacatggtacgtgcagtgagtgctgcggaggggcgcagaggcccgcgccctggctggccctgtgcatgcgccttgcgccctgctcccaggtgctcactaacccgtaatctgctgctctgtgtgcatgtgctgcccggcagggctgtcgtgtgcgtgttgggtgggaaggcggaggcggcgcggggcgggctggcctctgagcatctggctgcatttagcacg

SEQ ID NO: 691 - DNA, 502 bp, synthetic construct
  misc_feature 1..502: note = Synthetic
  source 1..502: mol_type = other DNA
gagcctcctgcccctcaccaggccctgttagcatcacctcgggcacctggccacagcaggggccagtcagggcaccccgggatagcacgcccaggccctgtgcaaggcctctggcacttaggagaggcttttgcccctttgtcctctgagcagaagggttggcaaagagggaaggggacaggccagttctgcacctggcctttctccagaatgaaggcctccacctcccgtccgcacccacagaaagaaaagtaaactgttttcgcggctgcgcagaaagaagaacatggtacgtgcagtgagtgctgcggaggggcgcagaggcccgcgccctggctggccctgtgcatgctgccttgcgccctgctcccaggtgccactaacccgtaatctggctctgtgtgcagtgctgcccggcagggctgtcgtgtgcgtgttgggtgggaaggcggaggcggcgcggggcgggctggcctctgagcatctggctgcatttagcacg

SEQ ID NO: 692 - DNA, 503 bp, synthetic construct
  misc_feature 1..503: note = Synthetic
  source 1..503: mol_type = other DNA
gagcctcctgcccctcaccaggccctgttagcatcacctcgggcacctggccacagcaggggccagtcagggcaccccgggatagcacgcccaggccctgtgcaaggcctctggcacttaggagaggcttttgcccctttgtcctctgagcagaagggttggcaaagagggaaggggacaggccagttctgcacctggcctttctccagaatgaaggcctccacctcccgtccgcacccacagaaagaaaagtaaactgttttcgcggctgcgcagaaagaagaacatggtacgtgcagtgagtgctgcggaggggcgcagaggcccgcgccctggctggccctgtgcatgctgccttgcgccctgctcccaggtgccactaacccgtaatctggctctgtgtgcatgtgctgcccggcagggctgtcgtgtgcgtgttgggtgggaaggcggaggcggcgcggggcgggctggcctctgagcatctggctgcatttagcacg

SEQ ID NO: 693 - DNA, 504 bp, synthetic construct
  misc_feature 1..504: note = Synthetic
  source 1..504: mol_type = other DNA
gagcctcctgcccctcaccaggccctgttagcatcacctcgggcacctggccacagcaggggccagtcagggcaccccgggatagcacgcccaggccctgtgcaaggcctctggcacttaggagaggcttttgcccctttgtcctctgagcagaagggttggcaaagagggaaggggacaggccagttctgcacctggcctttctccagaatgaaggcctccacctcccgtccgcacccacagaaagaaaagtaaactgttttcgcggctgcgcagaaagaagaacatggtacgtgcagtgagtgctgcggaggggcgcagaggcccgcgccctggctggccctgtgcatgctgccttgcgccctgctcccaggtgccactaacccgtaatctgctgctctgtgtgcagtgctgcccggcagggctgtcgtgtgcgtgttgggtgggaaggcggaggcggcgcggggcgggctggcctctgagcatctggctgcatttagcacg

SEQ ID NO: 694 - DNA, 505 bp, synthetic construct
  misc_feature 1..505: note = Synthetic
  source 1..505: mol_type = other DNA
gagcctcctgcccctcaccaggccctgttagcatcacctcgggcacctggccacagcaggggccagtcagggcaccccgggatagcacgcccaggccctgtgcaaggcctctggcacttaggagaggcttttgcccctttgtcctctgagcagaagggttggcaaagagggaaggggacaggccagttctgcacctggcctttctccagaatgaaggcctccacctcccgtccgcacccacagaaagaaaagtaaactgttttcgcggctgcgcagaaagaagaacatggtacgtgcagtgagtgctgcggaggggcgcagaggcccgcgccctggctggccctgtgcatgctgccttgcgccctgctcccaggtgccactaacccgtaatctgctgctctgtgtgcatgtgctgcccggcagggctgtcgtgtgcgtgttgggtgggaaggcggaggcggcgcggggcgggctggcctctgagcatctggctgcatttagcacg

SEQ ID NO: 695 - DNA, 503 bp, synthetic construct
  misc_feature 1..503: note = Synthetic
  source 1..503: mol_type = other DNA
gagcctcctgcccctcaccaggccctgttagcatcacctcgggcacctggccacagcaggggccagtcagggcaccccgggatagcacgcccaggccctgtgcaaggcctctggcacttaggagaggcttttgcccctttgtcctctgagcagaagggttggcaaagagggaaggggacaggccagttctgcacctggcctttctccagaatgaaggcctccacctcccgtccgcacccacagaaagaaaagtaaactgttttcgcggctgcgcagaaagaagaacatggtacgtgcagtgagtgctgcggaggggcgcagaggcccgcgccctggctggccctgtgcatgctgccttgcgccctgctcccaggtgctcactaacccgtaatctggctctgtgtgcagtgctgcccggcagggctgtcgtgtgcgtgttgggtgggaaggcggaggcggcgcggggcgggctggcctctgagcatctggctgcatttagcacg

SEQ ID NO: 696 - DNA, 504 bp, synthetic construct
  misc_feature 1..504: note = Synthetic
  source 1..504: mol_type = other DNA
gagcctcctgcccctcaccaggccctgttagcatcacctcgggcacctggccacagcaggggccagtcagggcaccccgggatagcacgcccaggccctgtgcaaggcctctggcacttaggagaggcttttgcccctttgtcctctgagcagaagggttggcaaagagggaaggggacaggccagttctgcacctggcctttctccagaatgaaggcctccacctcccgtccgcacccacagaaagaaaagtaaactgttttcgcggctgcgcagaaagaagaacatggtacgtgcagtgagtgctgcggaggggcgcagaggcccgcgccctggctggccctgtgcatgctgccttgcgccctgctcccaggtgctcactaacccgtaatctggctctgtgtgcatgtgctgcccggcagggctgtcgtgtgcgtgttgggtgggaaggcggaggcggcgcggggcgggctggcctctgagcatctggctgcatttagcacg

SEQ ID NO: 697 - DNA, 505 bp, synthetic construct
  misc_feature 1..505: note = Synthetic
  source 1..505: mol_type = other DNA
gagcctcctgcccctcaccaggccctgttagcatcacctcgggcacctggccacagcaggggccagtcagggcaccccgggatagcacgcccaggccctgtgcaaggcctctggcacttaggagaggcttttgcccctttgtcctctgagcagaagggttggcaaagagggaaggggacaggccagttctgcacctggcctttctccagaatgaaggcctccacctcccgtccgcacccacagaaagaaaagtaaactgttttcgcggctgcgcagaaagaagaacatggtacgtgcagtgagtgctgcggaggggcgcagaggcccgcgccctggctggccctgtgcatgctgccttgcgccctgctcccaggtgctcactaacccgtaatctgctgctctgtgtgcagtgctgcccggcagggctgtcgtgtgcgtgttgggtgggaaggcggaggcggcgcggggcgggctggcctctgagcatctggctgcatttagcacg

SEQ ID NO: 698 - DNA, 506 bp, synthetic construct
  misc_feature 1..506: note = Synthetic
  source 1..506: mol_type = other DNA
gagcctcctgcccctcaccaggccctgttagcatcacctcgggcacctggccacagcaggggccagtcagggcaccccgggatagcacgcccaggccctgtgcaaggcctctggcacttaggagaggcttttgcccctttgtcctctgagcagaagggttggcaaagagggaaggggacaggccagttctgcacctggcctttctccagaatgaaggcctccacctcccgtccgcacccacagaaagaaaagtaaactgttttcgcggctgcgcagaaagaagaacatggtacgtgcagtgagtgctgcggaggggcgcagaggcccgcgccctggctggccctgtgcatgctgccttgcgccctgctcccaggtgctcactaacccgtaatctgctgctctgtgtgcatgtgctgcccggcagggctgtcgtgtgcgtgttgggtgggaaggcggaggcggcgcggggcgggctggcctctgagcatctggctgcatttagcacg

SEQ ID NO: 699 - DNA, 501 bp, synthetic construct
  misc_feature 1..501: note = Synthetic
  source 1..501: mol_type = other DNA
gagcctcctgcccctcaccaggccctgttagcatcacctcgggcacctggccacagcaggggccagtcagggcaccccgggatagcacgcccaggccctgtgcaaggcctctggcacttaggagaggcttttgcccctttgtcctctgagcagaagggttggcaaagagggaaggggacaggccagttctgcacctggcctttctccagaatgaaggcctccacctcccgtccgcacccacagaaagaaaagtaaactgttttcgcggctgcgcagaaagaagaacatggtaagtgcagtgagtgctgcggaggggcgcagaggcccgcgccctggctggccctgtgcatgcgccttgcgccctgctcccaggtgccactaacccgtaatctggctctgtgtgcagtgctgcccggcagggctgtcgtgtgcgtgttgggtgggaaggcggaggcggcgcggggcgggctggcctctgagcatctggctgcatttagcacg

SEQ ID NO: 700 - DNA, 502 bp, synthetic construct
  misc_feature 1..502: note = Synthetic
  source 1..502: mol_type = other DNA
gagcctcctgcccctcaccaggccctgttagcatcacctcgggcacctggccacagcaggggccagtcagggcaccccgggatagcacgcccaggccctgtgcaaggcctctggcacttaggagaggcttttgcccctttgtcctctgagcagaagggttggcaaagagggaaggggacaggccagttctgcacctggcctttctccagaatgaaggcctccacctcccgtccgcacccacagaaagaaaagtaaactgttttcgcggctgcgcagaaagaagaacatggtaagtgcagtgagtgctgcggaggggcgcagaggcccgcgccctggctggccctgtgcatgcgccttgcgccctgctcccaggtgccactaacccgtaatctggctctgtgtgcatgtgctgcccggcagggctgtcgtgtgcgtgttgggtgggaaggcggaggcggcgcggggcgggctggcctctgagcatctggctgcatttagcacg

SEQ ID NO: 701 - DNA, 503 bp, synthetic construct
  misc_feature 1..503: note = Synthetic
  source 1..503: mol_type = other DNA
gagcctcctgcccctcaccaggccctgttagcatcacctcgggcacctggccacagcaggggccagtcagggcaccccgggatagcacgcccaggccctgtgcaaggcctctggcacttaggagaggcttttgcccctttgtcctctgagcagaagggttggcaaagagggaaggggacaggccagttctgcacctggcctttctccagaatgaaggcctccacctcccgtccgcacccacagaaagaaaagtaaactgttttcgcggctgcgcagaaagaagaacatggtaagtgcagtgagtgctgcggaggggcgcagaggcccgcgccctggctggccctgtgcatgcgccttgcgccctgctcccaggtgccactaacccgtaatctgctgctctgtgtgcagtgctgcccggcagggctgtcgtgtgcgtgttgggtgggaaggcggaggcggcgcggggcgggctggcctctgagcatctggctgcatttagcacg

SEQ ID NO: 702 - DNA, 504 bp, synthetic construct
  misc_feature 1..504: note = Synthetic
  source 1..504: mol_type = other DNA
gagcctcctgcccctcaccaggccctgttagcatcacctcgggcacctggccacagcaggggccagtcagggcaccccgggatagcacgcccaggccctgtgcaaggcctctggcacttaggagaggcttttgcccctttgtcctctgagcagaagggttggcaaagagggaaggggacaggccagttctgcacctggcctttctccagaatgaaggcctccacctcccgtccgcacccacagaaagaaaagtaaactgttttcgcggctgcgcagaaagaagaacatggtaagtgcagtgagtgctgcggaggggcgcagaggcccgcgccctggctggccctgtgcatgcgccttgcgccctgctcccaggtgccactaacccgtaatctgctgctctgtgtgcatgtgctgcccggcagggctgtcgtgtgcgtgttgggtgggaaggcggaggcggcgcggggcgggctggcctctgagcatctggctgcatttagcacg

SEQ ID NO: 703 - DNA, 502 bp, synthetic construct
  misc_feature 1..502: note = Synthetic
  source 1..502: mol_type = other DNA
gagcctcctgcccctcaccaggccctgttagcatcacctcgggcacctggccacagcaggggccagtcagggcaccccgggatagcacgcccaggccctgtgcaaggcctctggcacttaggagaggcttttgcccctttgtcctctgagcagaagggttggcaaagagggaaggggacaggccagttctgcacctggcctttctccagaatgaaggcctccacctcccgtccgcacccacagaaagaaaagtaaactgttttcgcggctgcgcagaaagaagaacatggtaagtgcagtgagtgctgcggaggggcgcagaggcccgcgccctggctggccctgtgcatgcgccttgcgccctgctcccaggtgctcactaacccgtaatctggctctgtgtgcagtgctgcccggcagggctgtcgtgtgcgtgttgggtgggaaggcggaggcggcgcggggcgggctggcctctgagcatctggctgcatttagcacg

SEQ ID NO: 704 - DNA, 503 bp, synthetic construct
  misc_feature 1..503: note = Synthetic
  source 1..503: mol_type = other DNA
gagcctcctgcccctcaccaggccctgttagcatcacctcgggcacctggccacagcaggggccagtcagggcaccccgggatagcacgcccaggccctgtgcaaggcctctggcacttaggagaggcttttgcccctttgtcctctgagcagaagggttggcaaagagggaaggggacaggccagttctgcacctggcctttctccagaatgaaggcctccacctcccgtccgcacccacagaaagaaaagtaaactgttttcgcggctgcgcagaaagaagaacatggtaagtgcagtgagtgctgcggaggggcgcagaggcccgcgccctggctggccctgtgcatgcgccttgcgccctgctcccaggtgctcactaacccgtaatctggctctgtgtgcatgtgctgcccggcagggctgtcgtgtgcgtgttgggtgggaaggcggaggcggcgcggggcgggctggcctctgagcatctggctgcatttagcacg

SEQ ID NO: 705 - DNA, 504 bp, synthetic construct
  misc_feature 1..504: note = Synthetic
  source 1..504: mol_type = other DNA
gagcctcctgcccctcaccaggccctgttagcatcacctcgggcacctggccacagcaggggccagtcagggcaccccgggatagcacgcccaggccctgtgcaaggcctctggcacttaggagaggcttttgcccctttgtcctctgagcagaagggttggcaaagagggaaggggacaggccagttctgcacctggcctttctccagaatgaaggcctccacctcccgtccgcacccacagaaagaaaagtaaactgttttcgcggctgcgcagaaagaagaacatggtaagtgcagtgagtgctgcggaggggcgcagaggcccgcgccctggctggccctgtgcatgcgccttgcgccctgctcccaggtgctcactaacccgtaatctgctgctctgtgtgcagtgctgcccggcagggctgtcgtgtgcgtgttgggtgggaaggcggaggcggcgcggggcgggctggcctctgagcatctggctgcatttagcacg

SEQ ID NO: 706 - DNA, 505 bp, synthetic construct
  misc_feature 1..505: note = Synthetic
  source 1..505: mol_type = other DNA
gagcctcctgcccctcaccaggccctgttagcatcacctcgggcacctggccacagcaggggccagtcagggcaccccgggatagcacgcccaggccctgtgcaaggcctctggcacttaggagaggcttttgcccctttgtcctctgagcagaagggttggcaaagagggaaggggacaggccagttctgcacctggcctttctccagaatgaaggcctccacctcccgtccgcacccacagaaagaaaagtaaactgttttcgcggctgcgcagaaagaagaacatggtaagtgcagtgagtgctgcggaggggcgcagaggcccgcgccctggctggccctgtgcatgcgccttgcgccctgctcccaggtgctcactaacccgtaatctgctgctctgtgtgcatgtgctgcccggcagggctgtcgtgtgcgtgttgggtgggaaggcggaggcggcgcggggcgggctggcctctgagcatctggctgcatttagcacg

SEQ ID NO: 707 - DNA, 502 bp, synthetic construct
  misc_feature 1..502: note = Synthetic
  source 1..502: mol_type = other DNA
gagcctcctgcccctcaccaggccctgttagcatcacctcgggcacctggccacagcaggggccagtcagggcaccccgggatagcacgcccaggccctgtgcaaggcctctggcacttaggagaggcttttgcccctttgtcctctgagcagaagggttggcaaagagggaaggggacaggccagttctgcacctggcctttctccagaatgaaggcctccacctcccgtccgcacccacagaaagaaaagtaaactgttttcgcggctgcgcagaaagaagaacatggtaagtgcagtgagtgctgcggaggggcgcagaggcccgcgccctggctggccctgtgcatgctgccttgcgccctgctcccaggtgccactaacccgtaatctggctctgtgtgcagtgctgcccggcagggctgtcgtgtgcgtgttgggtgggaaggcggaggcggcgcggggcgggctggcctctgagcatctggctgcatttagcacg

SEQ ID NO: 708 - DNA, 503 bp, synthetic construct
  misc_feature 1..503: note = Synthetic
  source 1..503: mol_type = other DNA
gagcctcctgcccctcaccaggccctgttagcatcacctcgggcacctggccacagcaggggccagtcagggcaccccgggatagcacgcccaggccctgtgcaaggcctctggcacttaggagaggcttttgcccctttgtcctctgagcagaagggttggcaaagagggaaggggacaggccagttctgcacctggcctttctccagaatgaaggcctccacctcccgtccgcacccacagaaagaaaagtaaactgttttcgcggctgcgcagaaagaagaacatggtaagtgcagtgagtgctgcggaggggcgcagaggcccgcgccctggctggccctgtgcatgctgccttgcgccctgctcccaggtgccactaacccgtaatctggctctgtgtgcatgtgctgcccggcagggctgtcgtgtgcgtgttgggtgggaaggcggaggcggcgcggggcgggctggcctctgagcatctggctgcatttagcacg

SEQ ID NO: 709 - DNA, 504 bp, synthetic construct
  misc_feature 1..504: note = Synthetic
  source 1..504: mol_type = other DNA
gagcctcctgcccctcaccaggccctgttagcatcacctcgggcacctggccacagcaggggccagtcagggcaccccgggatagcacgcccaggccctgtgcaaggcctctggcacttaggagaggcttttgcccctttgtcctctgagcagaagggttggcaaagagggaaggggacaggccagttctgcacctggcctttctccagaatgaaggcctccacctcccgtccgcacccacagaaagaaaagtaaactgttttcgcggctgcgcagaaagaagaacatggtaagtgcagtgagtgctgcggaggggcgcagaggcccgcgccctggctggccctgtgcatgctgccttgcgccctgctcccaggtgccactaacccgtaatctgctgctctgtgtgcagtgctgcccggcagggctgtcgtgtgcgtgttgggtgggaaggcggaggcggcgcggggcgggctggcctctgagcatctggctgcatttagcacg

SEQ ID NO: 710 - DNA, 505 bp, synthetic construct
  misc_feature 1..505: note = Synthetic
  source 1..505: mol_type = other DNA
gagcctcctgcccctcaccaggccctgttagcatcacctcgggcacctggccacagcaggggccagtcagggcaccccgggatagcacgcccaggccctgtgcaaggcctctggcacttaggagaggcttttgcccctttgtcctctgagcagaagggttggcaaagagggaaggggacaggccagttctgcacctggcctttctccagaatgaaggcctccacctcccgtccgcacccacagaaagaaaagtaaactgttttcgcggctgcgcagaaagaagaacatggtaagtgcagtgagtgctgcggaggggcgcagaggcccgcgccctggctggccctgtgcatgctgccttgcgccctgctcccaggtgccactaacccgtaatctgctgctctgtgtgcatgtgctgcccggcagggctgtcgtgtgcgtgttgggtgggaaggcggaggcggcgcggggcgggctggcctctgagcatctggctgcatttagcacg

SEQ ID NO: 711 - DNA, 503 bp, synthetic construct
  misc_feature 1..503: note = Synthetic
  source 1..503: mol_type = other DNA
gagcctcctgcccctcaccaggccctgttagcatcacctcgggcacctggccacagcaggggccagtcagggcaccccgggatagcacgcccaggccctgtgcaaggcctctggcacttaggagaggcttttgcccctttgtcctctgagcagaagggttggcaaagagggaaggggacaggccagttctgcacctggcctttctccagaatgaaggcctccacctcccgtccgcacccacagaaagaaaagtaaactgttttcgcggctgcgcagaaagaagaacatggtaagtgcagtgagtgctgcggaggggcgcagaggcccgcgccctggctggccctgtgcatgctgccttgcgccctgctcccaggtgctcactaacccgtaatctggctctgtgtgcagtgctgcccggcagggctgtcgtgtgcgtgttgggtgggaaggcggaggcggcgcggggcgggctggcctctgagcatctggctgcatttagcacg

SEQ ID NO: 712 - DNA, 504 bp, synthetic construct
  misc_feature 1..504: note = Synthetic
  source 1..504: mol_type = other DNA
gagcctcctgcccctcaccaggccctgttagcatcacctcgggcacctggccacagcaggggccagtcagggcaccccgggatagcacgcccaggccctgtgcaaggcctctggcacttaggagaggcttttgcccctttgtcctctgagcagaagggttggcaaagagggaaggggacaggccagttctgcacctggcctttctccagaatgaaggcctccacctcccgtccgcacccacagaaagaaaagtaaactgttttcgcggctgcgcagaaagaagaacatggtaagtgcagtgagtgctgcggaggggcgcagaggcccgcgccctggctggccctgtgcatgctgccttgcgccctgctcccaggtgctcactaacccgtaatctggctctgtgtgcatgtgctgcccggcagggctgtcgtgtgcgtgttgggtgggaaggcggaggcggcgcggggcgggctggcctctgagcatctggctgcatttagcacg

SEQ ID NO: 713 - DNA, 505 bp, synthetic construct
  misc_feature 1..505: note = Synthetic
  source 1..505: mol_type = other DNA
gagcctcctgcccctcaccaggccctgttagcatcacctcgggcacctggccacagcaggggccagtcagggcaccccgggatagcacgcccaggccctgtgcaaggcctctggcacttaggagaggcttttgcccctttgtcctctgagcagaagggttggcaaagagggaaggggacaggccagttctgcacctggcctttctccagaatgaaggcctccacctcccgtccgcacccacagaaagaaaagtaaactgttttcgcggctgcgcagaaagaagaacatggtaagtgcagtgagtgctgcggaggggcgcagaggcccgcgccctggctggccctgtgcatgctgccttgcgccctgctcccaggtgctcactaacccgtaatctgctgctctgtgtgcagtgctgcccggcagggctgtcgtgtgcgtgttgggtgggaaggcggaggcggcgcggggcgggctggcctctgagcatctggctgcatttagcacg

SEQ ID NO: 714 - DNA, 506 bp, synthetic construct
  misc_feature 1..506: note = Synthetic
  source 1..506: mol_type = other DNA
gagcctcctgcccctcaccaggccctgttagcatcacctcgggcacctggccacagcaggggccagtcagggcaccccgggatagcacgcccaggccctgtgcaaggcctctggcacttaggagaggcttttgcccctttgtcctctgagcagaagggttggcaaagagggaaggggacaggccagttctgcacctggcctttctccagaatgaaggcctccacctcccgtccgcacccacagaaagaaaagtaaactgttttcgcggctgcgcagaaagaagaacatggtaagtgcagtgagtgctgcggaggggcgcagaggcccgcgccctggctggccctgtgcatgctgccttgcgccctgctcccaggtgctcactaacccgtaatctgctgctctgtgtgcatgtgctgcccggcagggctgtcgtgtgcgtgttgggtgggaaggcggaggcggcgcggggcgggctggcctctgagcatctggctgcatttagcacg

SEQ ID NO: 715 - DNA, 501 bp, synthetic construct
  misc_feature 1..501: note = Synthetic
  source 1..501: mol_type = other DNA
gagcctcctgcccctcaccaggccctgttagcatcacctcgggcacctggccacagcaggggccagtcagggcaccccgggatagcacgcccaggccctgtgcaaggcctctggcacttaggagaggcttttgcccctttgtcctctgagcagaagggttggcaaagagggaaggggacaggccagttctgcacctggcctttctccagaatgaaggcctccacctcccgtccgcacccacagaaagaaaagtaaactgttttcgcggctgcgcagaaagaagaacatggtaggtgcagtgagtgctgcggaggggcgcagaggcccgcgccctggctggccctgtgcatgcgccttgcgccctgctcccaggtgccactaacccgtaatctggctctgtgtgcagtgctgcccggcagggctgtcgtgtgcgtgttgggtgggaaggcggaggcggcgcggggcgggctggcctctgagcatctggctgcatttagcacg

SEQ ID NO: 716 - DNA, 502 bp, synthetic construct
  misc_feature 1..502: note = Synthetic
  source 1..502: mol_type = other DNA
gagcctcctgcccctcaccaggccctgttagcatcacctcgggcacctggccacagcaggggccagtcagggcaccccgggatagcacgcccaggccctgtgcaaggcctctggcacttaggagaggcttttgcccctttgtcctctgagcagaagggttggcaaagagggaaggggacaggccagttctgcacctggcctttctccagaatgaaggcctccacctcccgtccgcacccacagaaagaaaagtaaactgttttcgcggctgcgcagaaagaagaacatggtaggtgcagtgagtgctgcggaggggcgcagaggcccgcgccctggctggccctgtgcatgcgccttgcgccctgctcccaggtgccactaacccgtaatctggctctgtgtgcatgtgctgcccggcagggctgtcgtgtgcgtgttgggtgggaaggcggaggcggcgcggggcgggctggcctctgagcatctggctgcatttagcacg

SEQ ID NO: 717 - DNA, 503 bp, synthetic construct
  misc_feature 1..503: note = Synthetic
  source 1..503: mol_type = other DNA
gagcctcctgcccctcaccaggccctgttagcatcacctcgggcacctggccacagcaggggccagtcagggcaccccgggatagcacgcccaggccctgtgcaaggcctctggcacttaggagaggcttttgcccctttgtcctctgagcagaagggttggcaaagagggaaggggacaggccagttctgcacctggcctttctccagaatgaaggcctccacctcccgtccgcacccacagaaagaaaagtaaactgttttcgcggctgcgcagaaagaagaacatggtaggtgcagtgagtgctgcggaggggcgcagaggcccgcgccctggctggccctgtgcatgcgccttgcgccctgctcccaggtgccactaacccgtaatctgctgctctgtgtgcagtgctgcccggcagggctgtcgtgtgcgtgttgggtgggaaggcggaggcggcgcggggcgggctggcctctgagcatctggctgcatttagcacg

SEQ ID NO: 718 - DNA, 504 bp, synthetic construct
  misc_feature 1..504: note = Synthetic
  source 1..504: mol_type = other DNA
gagcctcctgcccctcaccaggccctgttagcatcacctcgggcacctggccacagcaggggccagtcagggcaccccgggatagcacgcccaggccctgtgcaaggcctctggcacttaggagaggcttttgcccctttgtcctctgagcagaagggttggcaaagagggaaggggacaggccagttctgcacctggcctttctccagaatgaaggcctccacctcccgtccgcacccacagaaagaaaagtaaactgttttcgcggctgcgcagaaagaagaacatggtaggtgcagtgagtgctgcggaggggcgcagaggcccgcgccctggctggccctgtgcatgcgccttgcgccctgctcccaggtgccactaacccgtaatctgctgctctgtgtgcatgtgctgcccggcagggctgtcgtgtgcgtgttgggtgggaaggcggaggcggcgcggggcgggctggcctctgagcatctggctgcatttagcacg

SEQ ID NO: 719 - DNA, 502 bp, synthetic construct
  misc_feature 1..502: note = Synthetic
  source 1..502: mol_type = other DNA
gagcctcctgcccctcaccaggccctgttagcatcacctcgggcacctggccacagcaggggccagtcagggcaccccgggatagcacgcccaggccctgtgcaaggcctctggcacttaggagaggcttttgcccctttgtcctctgagcagaagggttggcaaagagggaaggggacaggccagttctgcacctggcctttctccagaatgaaggcctccacctcccgtccgcacccacagaaagaaaagtaaactgttttcgcggctgcgcagaaagaagaacatggtaggtgcagtgagtgctgcggaggggcgcagaggcccgcgccctggctggccctgtgcatgcgccttgcgccctgctcccaggtgctcactaacccgtaatctggctctgtgtgcagtgctgcccggcagggctgtcgtgtgcgtgttgggtgggaaggcggaggcggcgcggggcgggctggcctctgagcatctggctgcatttagcacg

SEQ ID NO: 720 - DNA, 503 bp, synthetic construct
  misc_feature 1..503: note = Synthetic
  source 1..503: mol_type = other DNA
gagcctcctgcccctcaccaggccctgttagcatcacctcgggcacctggccacagcaggggccagtcagggcaccccgggatagcacgcccaggccctgtgcaaggcctctggcacttaggagaggcttttgcccctttgtcctctgagcagaagggttggcaaagagggaaggggacaggccagttctgcacctggcctttctccagaatgaaggcctccacctcccgtccgcacccacagaaagaaaagtaaactgttttcgcggctgcgcagaaagaagaacatggtaggtgcagtgagtgctgcggaggggcgcagaggcccgcgccctggctggccctgtgcatgcgccttgcgccctgctcccaggtgctcactaacccgtaatctggctctgtgtgcatgtgctgcccggcagggctgtcgtgtgcgtgttgggtgggaaggcggaggcggcgcggggcgggctggcctctgagcatctggctgcatttagcacg

SEQ ID NO: 721 - DNA, 504 bp, synthetic construct
  misc_feature 1..504: note = Synthetic
  source 1..504: mol_type = other DNA
gagcctcctgcccctcaccaggccctgttagcatcacctcgggcacctggccacagcaggggccagtcagggcaccccgggatagcacgcccaggccctgtgcaaggcctctggcacttaggagaggcttttgcccctttgtcctctgagcagaagggttggcaaagagggaaggggacaggccagttctgcacctggcctttctccagaatgaaggcctccacctcccgtccgcacccacagaaagaaaagtaaactgttttcgcggctgcgcagaaagaagaacatggtaggtgcagtgagtgctgcggaggggcgcagaggcccgcgccctggctggccctgtgcatgcgccttgcgccctgctcccaggtgctcactaacccgtaatctgctgctctgtgtgcagtgctgcccggcagggctgtcgtgtgcgtgttgggtgggaaggcggaggcggcgcggggcgggctggcctctgagcatctggctgcatttagcacg

SEQ ID NO: 722 - DNA, 505 bp, synthetic construct
  misc_feature 1..505: note = Synthetic
  source 1..505: mol_type = other DNA
gagcctcctgcccctcaccaggccctgttagcatcacctcgggcacctggccacagcaggggccagtcagggcaccccgggatagcacgcccaggccctgtgcaaggcctctggcacttaggagaggcttttgcccctttgtcctctgagcagaagggttggcaaagagggaaggggacaggccagttctgcacctggcctttctccagaatgaaggcctccacctcccgtccgcacccacagaaagaaaagtaaactgttttcgcggctgcgcagaaagaagaacatggtaggtgcagtgagtgctgcggaggggcgcagaggcccgcgccctggctggccctgtgcatgcgccttgcgccctgctcccaggtgctcactaacccgtaatctgctgctctgtgtgcatgtgctgcccggcagggctgtcgtgtgcgtgttgggtgggaaggcggaggcggcgcggggcgggctggcctctgagcatctggctgcatttagcacg

SEQ ID NO: 723 - DNA, 502 bp, synthetic construct
  misc_feature 1..502: note = Synthetic
  source 1..502: mol_type = other DNA
gagcctcctgcccctcaccaggccctgttagcatcacctcgggcacctggccacagcaggggccagtcagggcaccccgggatagcacgcccaggccctgtgcaaggcctctggcacttaggagaggcttttgcccctttgtcctctgagcagaagggttggcaaagagggaaggggacaggccagttctgcacctggcctttctccagaatgaaggcctccacctcccgtccgcacccacagaaagaaaagtaaactgttttcgcggctgcgcagaaagaagaacatggtaggtgcagtgagtgctgcggaggggcgcagaggcccgcgccctggctggccctgtgcatgctgccttgcgccctgctcccaggtgccactaacccgtaatctggctctgtgtgcagtgctgcccggcagggctgtcgtgtgcgtgttgggtgggaaggcggaggcggcgcggggcgggctggcctctgagcatctggctgcatttagcacg

SEQ ID NO: 724 - DNA, 503 bp, synthetic construct
  misc_feature 1..503: note = Synthetic
  source 1..503: mol_type = other DNA
gagcctcctgcccctcaccaggccctgttagcatcacctcgggcacctggccacagcaggggccagtcagggcaccccgggatagcacgcccaggccctgtgcaaggcctctggcacttaggagaggcttttgcccctttgtcctctgagcagaagggttggcaaagagggaaggggacaggccagttctgcacctggcctttctccagaatgaaggcctccacctcccgtccgcacccacagaaagaaaagtaaactgttttcgcggctgcgcagaaagaagaacatggtaggtgcagtgagtgctgcggaggggcgcagaggcccgcgccctggctggccctgtgcatgctgccttgcgccctgctcccaggtgccactaacccgtaatctggctctgtgtgcatgtgctgcccggcagggctgtcgtgtgcgtgttgggtgggaaggcggaggcggcgcggggcgggctggcctctgagcatctggctgcatttagcacg

SEQ ID NO: 725 - DNA, 504 bp, synthetic construct
  misc_feature 1..504: note = Synthetic
  source 1..504: mol_type = other DNA
gagcctcctgcccctcaccaggccctgttagcatcacctcgggcacctggccacagcaggggccagtcagggcaccccgggatagcacgcccaggccctgtgcaaggcctctggcacttaggagaggcttttgcccctttgtcctctgagcagaagggttggcaaagagggaaggggacaggccagttctgcacctggcctttctccagaatgaaggcctccacctcccgtccgcacccacagaaagaaaagtaaactgttttcgcggctgcgcagaaagaagaacatggtaggtgcagtgagtgctgcggaggggcgcagaggcccgcgccctggctggccctgtgcatgctgccttgcgccctgctcccaggtgccactaacccgtaatctgctgctctgtgtgcagtgctgcccggcagggctgtcgtgtgcgtgttgggtgggaaggcggaggcggcgcggggcgggctggcctctgagcatctggctgcatttagcacg

SEQ ID NO: 726 - DNA, 505 bp, synthetic construct
  misc_feature 1..505: note = Synthetic
  source 1..505: mol_type = other DNA
gagcctcctgcccctcaccaggccctgttagcatcacctcgggcacctggccacagcaggggccagtcagggcaccccgggatagcacgcccaggccctgtgcaaggcctctggcacttaggagaggcttttgcccctttgtcctctgagcagaagggttggcaaagagggaaggggacaggccagttctgcacctggcctttctccagaatgaaggcctccacctcccgtccgcacccacagaaagaaaagtaaactgttttcgcggctgcgcagaaagaagaacatggtaggtgcagtgagtgctgcggaggggcgcagaggcccgcgccctggctggccctgtgcatgctgccttgcgccctgctcccaggtgccactaacccgtaatctgctgctctgtgtgcatgtgctgcccggcagggctgtcgtgtgcgtgttgggtgggaaggcggaggcggcgcggggcgggctggcctctgagcatctggctgcatttagcacg

SEQ ID NO: 727 - DNA, 503 bp, synthetic construct
  misc_feature 1..503: note = Synthetic
  source 1..503: mol_type = other DNA
gagcctcctgcccctcaccaggccctgttagcatcacctcgggcacctggccacagcaggggccagtcagggcaccccgggatagcacgcccaggccctgtgcaaggcctctggcacttaggagaggcttttgcccctttgtcctctgagcagaagggttggcaaagagggaaggggacaggccagttctgcacctggcctttctccagaatgaaggcctccacctcccgtccgcacccacagaaagaaaagtaaactgttttcgcggctgcgcagaaagaagaacatggtaggtgcagtgagtgctgcggaggggcgcagaggcccgcgccctggctggccctgtgcatgctgccttgcgccctgctcccaggtgctcactaacccgtaatctggctctgtgtgcagtgctgcccggcagggctgtcgtgtgcgtgttgggtgggaaggcggaggcggcgcggggcgggctggcctctgagcatctggctgcatttagcacg

SEQ ID NO: 728 - DNA, 504 bp, synthetic construct
  misc_feature 1..504: note = Synthetic
  source 1..504: mol_type = other DNA
gagcctcctgcccctcaccaggccctgttagcatcacctcgggcacctggccacagcaggggccagtcagggcaccccgggatagcacgcccaggccctgtgcaaggcctctggcacttaggagaggcttttgcccctttgtcctctgagcagaagggttggcaaagagggaaggggacaggccagttctgcacctggcctttctccagaatgaaggcctccacctcccgtccgcacccacagaaagaaaagtaaactgttttcgcggctgcgcagaaagaagaacatggtaggtgcagtgagtgctgcggaggggcgcagaggcccgcgccctggctggccctgtgcatgctgccttgcgccctgctcccaggtgctcactaacccgtaatctggctctgtgtgcatgtgctgcccggcagggctgtcgtgtgcgtgttgggtgggaaggcggaggcggcgcggggcgggctggcctctgagcatctggctgcatttagcacg

SEQ ID NO: 729 - DNA, 505 bp, synthetic construct
  misc_feature 1..505: note = Synthetic
  source 1..505: mol_type = other DNA
gagcctcctgcccctcaccaggccctgttagcatcacctcgggcacctggccacagcaggggccagtcagggcaccccgggatagcacgcccaggccctgtgcaaggcctctggcacttaggagaggcttttgcccctttgtcctctgagcagaagggttggcaaagagggaaggggacaggccagttctgcacctggcctttctccagaatgaaggcctccacctcccgtccgcacccacagaaagaaaagtaaactgttttcgcggctgcgcagaaagaagaacatggtaggtgcagtgagtgctgcggaggggcgcagaggcccgcgccctggctggccctgtgcatgctgccttgcgccctgctcccaggtgctcactaacccgtaatctgctgctctgtgtgcagtgctgcccggcagggctgtcgtgtgcgtgttgggtgggaaggcggaggcggcgcggggcgggctggcctctgagcatctggctgcatttagcacg

SEQ ID NO: 730 - DNA, 506 bp, synthetic construct
  misc_feature 1..506: note = Synthetic
  source 1..506: mol_type = other DNA
gagcctcctgcccctcaccaggccctgttagcatcacctcgggcacctggccacagcaggggccagtcagggcaccccgggatagcacgcccaggccctgtgcaaggcctctggcacttaggagaggcttttgcccctttgtcctctgagcagaagggttggcaaagagggaaggggacaggccagttctgcacctggcctttctccagaatgaaggcctccacctcccgtccgcacccacagaaagaaaagtaaactgttttcgcggctgcgcagaaagaagaacatggtaggtgcagtgagtgctgcggaggggcgcagaggcccgcgccctggctggccctgtgcatgctgccttgcgccctgctcccaggtgctcactaacccgtaatctgctgctctgtgtgcatgtgctgcccggcagggctgtcgtgtgcgtgttgggtgggaaggcggaggcggcgcggggcgggctggcctctgagcatctggctgcatttagcacg

SEQ ID NO: 731 - DNA, 501 bp, synthetic construct
  misc_feature 1..501: note = Synthetic
  source 1..501: mol_type = other DNA
gagcctcctgcccctcaccaggccctgttagcatcacctcgggcacctggccacagcaggggccagtcagggcaccccgggatagcacgcccaggccctgtgcaaggcctctggcacttaggagaggcttttgcccctttgtcctctgagcagaagggttggcaaagagggaaggggacaggccagttctgcacctggcctttctccagaatgaaggcctccacctcccgtccgcacccacagaaagaaaagtaaactgttttcgcggctgcgcagaaagaagaacatggtatgtgcagtgagtgctgcggaggggcgcagaggcccgcgccctggctggccctgtgcatgcgccttgcgccctgctcccaggtgccactaacccgtaatctggctctgtgtgcagtgctgcccggcagggctgtcgtgtgcgtgttgggtgggaaggcggaggcggcgcggggcgggctggcctctgagcatctggctgcatttagcacg

SEQ ID NO: 732 - DNA, 502 bp, synthetic construct
  misc_feature 1..502: note = Synthetic
  source 1..502: mol_type = other DNA
gagcctcctgcccctcaccaggccctgttagcatcacctcgggcacctggccacagcaggggccagtcagggcaccccgggatagcacgcccaggccctgtgcaaggcctctggcacttaggagaggcttttgcccctttgtcctctgagcagaagggttggcaaagagggaaggggacaggccagttctgcacctggcctttctccagaatgaaggcctccacctcccgtccgcacccacagaaagaaaagtaaactgttttcgcggctgcgcagaaagaagaacatggtatgtgcagtgagtgctgcggaggggcgcagaggcccgcgccctggctggccctgtgcatgcgccttgcgccctgctcccaggtgccactaacccgtaatctggctctgtgtgcatgtgctgcccggcagggctgtcgtgtgcgtgttgggtgggaaggcggaggcggcgcggggcgggctggcctctgagcatctggctgcatttagcacg

SEQ ID NO: 733 - DNA, 503 bp, synthetic construct
  misc_feature 1..503: note = Synthetic
  source 1..503: mol_type = other DNA
gagcctcctgcccctcaccaggccctgttagcatcacctcgggcacctggccacagcaggggccagtcagggcaccccgggatagcacgcccaggccctgtgcaaggcctctggcacttaggagaggcttttgcccctttgtcctctgagcagaagggttggcaaagagggaaggggacaggccagttctgcacctggcctttctccagaatgaaggcctccacctcccgtccgcacccacagaaagaaaagtaaactgttttcgcggctgcgcagaaagaagaacatggtatgtgcagtgagtgctgcggaggggcgcagaggcccgcgccctggctggccctgtgcatgcgccttgcgccctgctcccaggtgccactaacccgtaatctgctgctctgtgtgcagtgctgcccggcagggctgtcgtgtgcgtgttgggtgggaaggcggaggcggcgcggggcgggctggcctctgagcatctggctgcatttagcacg

SEQ ID NO: 734 - DNA, 504 bp, synthetic construct
  misc_feature 1..504: note = Synthetic
  source 1..504: mol_type = other DNA
gagcctcctgcccctcaccaggccctgttagcatcacctcgggcacctggccacagcaggggccagtcagggcaccccgggatagcacgcccaggccctgtgcaaggcctctggcacttaggagaggcttttgcccctttgtcctctgagcagaagggttggcaaagagggaaggggacaggccagttctgcacctggcctttctccagaatgaaggcctccacctcccgtccgcacccacagaaagaaaagtaaactgttttcgcggctgcgcagaaagaagaacatggtatgtgcagtgagtgctgcggaggggcgcagaggcccgcgccctggctggccctgtgcatgcgccttgcgccctgctcccaggtgccactaacccgtaatctgctgctctgtgtgcatgtgctgcccggcagggctgtcgtgtgcgtgttgggtgggaaggcggaggcggcgcggggcgggctggcctctgagcatctggctgcatttagcacg

SEQ ID NO: 735 - DNA, 502 bp, synthetic construct
  misc_feature 1..502: note = Synthetic
  source 1..502: mol_type = other DNA
gagcctcctgcccctcaccaggccctgttagcatcacctcgggcacctggccacagcaggggccagtcagggcaccccgggatagcacgcccaggccctgtgcaaggcctctggcacttaggagaggcttttgcccctttgtcctctgagcagaagggttggcaaagagggaaggggacaggccagttctgcacctggcctttctccagaatgaaggcctccacctcccgtccgcacccacagaaagaaaagtaaactgttttcgcggctgcgcagaaagaagaacatggtatgtgcagtgagtgctgcggaggggcgcagaggcccgcgccctggctggccctgtgcatgcgccttgcgccctgctcccaggtgctcactaacccgtaatctggctctgtgtgcagtgctgcccggcagggctgtcgtgtgcgtgttgggtgggaaggcggaggcggcgcggggcgggctggcctctgagcatctggctgcatttagcacg

SEQ ID NO: 736 - DNA, 503 bp, synthetic construct
  misc_feature 1..503: note = Synthetic
  source 1..503: mol_type = other DNA
gagcctcctgcccctcaccaggccctgttagcatcacctcgggcacctggccacagcaggggccagtcagggcaccccgggatagcacgcccaggccctgtgcaaggcctctggcacttaggagaggcttttgcccctttgtcctctgagcagaagggttggcaaagagggaaggggacaggccagttctgcacctggcctttctccagaatgaaggcctccacctcccgtccgcacccacagaaagaaaagtaaactgttttcgcggctgcgcagaaagaagaacatggtatgtgcagtgagtgctgcggaggggcgcagaggcccgcgccctggctggccctgtgcatgcgccttgcgccctgctcccaggtgctcactaacccgtaatctggctctgtgtgcatgtgctgcccggcagggctgtcgtgtgcgtgttgggtgggaaggcggaggcggcgcggggcgggctggcctctgagcatctggctgcatttagcacg

SEQ ID NO: 737 - DNA, 504 bp, synthetic construct
  misc_feature 1..504: note = Synthetic
  source 1..504: mol_type = other DNA
gagcctcctgcccctcaccaggccctgttagcatcacctcgggcacctggccacagcaggggccagtcagggcaccccgggatagcacgcccaggccctgtgcaaggcctctggcacttaggagaggcttttgcccctttgtcctctgagcagaagggttggcaaagagggaaggggacaggccagttctgcacctggcctttctccagaatgaaggcctccacctcccgtccgcacccacagaaagaaaagtaaactgttttcgcggctgcgcagaaagaagaacatggtatgtgcagtgagtgctgcggaggggcgcagaggcccgcgccctggctggccctgtgcatgcgccttgcgccctgctcccaggtgctcactaacccgtaatctgctgctctgtgtgcagtgctgcccggcagggctgtcgtgtgcgtgttgggtgggaaggcggaggcggcgcggggcgggctggcctctgagcatctggctgcatttagcacg

SEQ ID NO: 738 - DNA, 505 bp, synthetic construct
  misc_feature 1..505: note = Synthetic
  source 1..505: mol_type = other DNA
gagcctcctgcccctcaccaggccctgttagcatcacctcgggcacctggccacagcaggggccagtcagggcaccccgggatagcacgcccaggccctgtgcaaggcctctggcacttaggagaggcttttgcccctttgtcctctgagcagaagggttggcaaagagggaaggggacaggccagttctgcacctggcctttctccagaatgaaggcctccacctcccgtccgcacccacagaaagaaaagtaaactgttttcgcggctgcgcagaaagaagaacatggtatgtgcagtgagtgctgcggaggggcgcagaggcccgcgccctggctggccctgtgcatgcgccttgcgccctgctcccaggtgctcactaacccgtaatctgctgctctgtgtgcatgtgctgcccggcagggctgtcgtgtgcgtgttgggtgggaaggcggaggcggcgcggggcgggctggcctctgagcatctggctgcatttagcacg

SEQ ID NO: 739 - DNA, 502 bp, synthetic construct
  misc_feature 1..502: note = Synthetic
  source 1..502: mol_type = other DNA
gagcctcctgcccctcaccaggccctgttagcatcacctcgggcacctggccacagcaggggccagtcagggcaccccgggatagcacgcccaggccctgtgcaaggcctctggcacttaggagaggcttttgcccctttgtcctctgagcagaagggttggcaaagagggaaggggacaggccagttctgcacctggcctttctccagaatgaaggcctccacctcccgtccgcacccacagaaagaaaagtaaactgttttcgcggctgcgcagaaagaagaacatggtatgtgcagtgagtgctgcggaggggcgcagaggcccgcgccctggctggccctgtgcatgctgccttgcgccctgctcccaggtgccactaacccgtaatctggctctgtgtgcagtgctgcccggcagggctgtcgtgtgcgtgttgggtgggaaggcggaggcggcgcggggcgggctggcctctgagcatctggctgcatttagcacg

SEQ ID NO: 740 - DNA, 503 bp, synthetic construct
  misc_feature 1..503: note = Synthetic
  source 1..503: mol_type = other DNA
gagcctcctgcccctcaccaggccctgttagcatcacctcgggcacctggccacagcaggggccagtcagggcaccccgggatagcacgcccaggccctgtgcaaggcctctggcacttaggagaggcttttgcccctttgtcctctgagcagaagggttggcaaagagggaaggggacaggccagttctgcacctggcctttctccagaatgaaggcctccacctcccgtccgcacccacagaaagaaaagtaaactgttttcgcggctgcgcagaaagaagaacatggtatgtgcagtgagtgctgcggaggggcgcagaggcccgcgccctggctggccctgtgcatgctgccttgcgccctgctcccaggtgccactaacccgtaatctggctctgtgtgcatgtgctgcccggcagggctgtcgtgtgcgtgttgggtgggaaggcggaggcggcgcggggcgggctggcctctgagcatctggctgcatttagcacg

SEQ ID NO: 741 - DNA, 504 bp, synthetic construct
  misc_feature 1..504: note = Synthetic
  source 1..504: mol_type = other DNA
gagcctcctgcccctcaccaggccctgttagcatcacctcgggcacctggccacagcaggggccagtcagggcaccccgggatagcacgcccaggccctgtgcaaggcctctggcacttaggagaggcttttgcccctttgtcctctgagcagaagggttggcaaagagggaaggggacaggccagttctgcacctggcctttctccagaatgaaggcctccacctcccgtccgcacccacagaaagaaaagtaaactgttttcgcggctgcgcagaaagaagaacatggtatgtgcagtgagtgctgcggaggggcgcagaggcccgcgccctggctggccctgtgcatgctgccttgcgccctgctcccaggtgccactaacccgtaatctgctgctctgtgtgcagtgctgcccggcagggctgtcgtgtgcgtgttgggtgggaaggcggaggcggcgcggggcgggctggcctctgagcatctggctgcatttagcacg

SEQ ID NO: 742 - DNA, 505 bp, synthetic construct
  misc_feature 1..505: note = Synthetic
  source 1..505: mol_type = other DNA
gagcctcctgcccctcaccaggccctgttagcatcacctcgggcacctggccacagcaggggccagtcagggcaccccgggatagcacgcccaggccctgtgcaaggcctctggcacttaggagaggcttttgcccctttgtcctctgagcagaagggttggcaaagagggaaggggacaggccagttctgcacctggcctttctccagaatgaaggcctccacctcccgtccgcacccacagaaagaaaagtaaactgttttcgcggctgcgcagaaagaagaacatggtatgtgcagtgagtgctgcggaggggcgcagaggcccgcgccctggctggccctgtgcatgctgccttgcgccctgctcccaggtgccactaacccgtaatctgctgctctgtgtgcatgtgctgcccggcagggctgtcgtgtgcgtgttgggtgggaaggcggaggcggcgcggggcgggctggcctctgagcatctggctgcatttagcacg

SEQ ID NO: 743 - DNA, 503 bp, synthetic construct
  misc_feature 1..503: note = Synthetic
  source 1..503: mol_type = other DNA
gagcctcctgcccctcaccaggccctgttagcatcacctcgggcacctggccacagcaggggccagtcagggcaccccgggatagcacgcccaggccctgtgcaaggcctctggcacttaggagaggcttttgcccctttgtcctctgagcagaagggttggcaaagagggaaggggacaggccagttctgcacctggcctttctccagaatgaaggcctccacctcccgtccgcacccacagaaagaaaagtaaactgttttcgcggctgcgcagaaagaagaacatggtatgtgcagtgagtgctgcggaggggcgcagaggcccgcgccctggctggccctgtgcatgctgccttgcgccctgctcccaggtgctcactaacccgtaatctggctctgtgtgcagtgctgcccggcagggctgtcgtgtgcgtgttgggtgggaaggcggaggcggcgcggggcgggctggcctctgagcatctggctgcatttagcacg

SEQ ID NO: 744 - DNA, 504 bp, synthetic construct
  misc_feature 1..504: note = Synthetic
  source 1..504: mol_type = other DNA
gagcctcctgcccctcaccaggccctgttagcatcacctcgggcacctggccacagcaggggccagtcagggcaccccgggatagcacgcccaggccctgtgcaaggcctctggcacttaggagaggcttttgcccctttgtcctctgagcagaagggttggcaaagagggaaggggacaggccagttctgcacctggcctttctccagaatgaaggcctccacctcccgtccgcacccacagaaagaaaagtaaactgttttcgcggctgcgcagaaagaagaacatggtatgtgcagtgagtgctgcggaggggcgcagaggcccgcgccctggctggccctgtgcatgctgccttgcgccctgctcccaggtgctcactaacccgtaatctggctctgtgtgcatgtgctgcccggcagggctgtcgtgtgcgtgttgggtgggaaggcggaggcggcgcggggcgggctggcctctgagcatctggctgcatttagcacg

SEQ ID NO: 745 - DNA, 505 bp, synthetic construct
  misc_feature 1..505: note = Synthetic
  source 1..505: mol_type = other DNA
gagcctcctgcccctcaccaggccctgttagcatcacctcgggcacctggccacagcaggggccagtcagggcaccccgggatagcacgcccaggccctgtgcaaggcctctggcacttaggagaggcttttgcccctttgtcctctgagcagaagggttggcaaagagggaaggggacaggccagttctgcacctggcctttctccagaatgaaggcctccacctcccgtccgcacccacagaaagaaaagtaaactgttttcgcggctgcgcagaaagaagaacatggtatgtgcagtgagtgctgcggaggggcgcagaggcccgcgccctggctggccctgtgcatgctgccttgcgccctgctcccaggtgctcactaacccgtaatctgctgctctgtgtgcagtgctgcccggcagggctgtcgtgtgcgtgttgggtgggaaggcggaggcggcgcggggcgggctggcctctgagcatctggctgcatttagcacg

SEQ ID NO: 746 - DNA, 506 bp, synthetic construct
  misc_feature 1..506: note = Synthetic
  source 1..506: mol_type = other DNA
gagcctcctgcccctcaccaggccctgttagcatcacctcgggcacctggccacagcaggggccagtcagggcaccccgggatagcacgcccaggccctgtgcaaggcctctggcacttaggagaggcttttgcccctttgtcctctgagcagaagggttggcaaagagggaaggggacaggccagttctgcacctggcctttctccagaatgaaggcctccacctcccgtccgcacccacagaaagaaaagtaaactgttttcgcggctgcgcagaaagaagaacatggtatgtgcagtgagtgctgcggaggggcgcagaggcccgcgccctggctggccctgtgcatgctgccttgcgccctgctcccaggtgctcactaacccgtaatctgctgctctgtgtgcatgtgctgcccggcagggctgtcgtgtgcgtgttgggtgggaaggcggaggcggcgcggggcgggctggcctctgagcatctggctgcatttagcacg

SEQ ID NO: 747 - DNA, 501 bp, synthetic construct
  misc_feature 1..501: note = Synthetic
  source 1..501: mol_type = other DNA
gagcctcctgcccctcaccaggccctgttagcatcacctcgggcacctggccacagcaggggccagtcagggcaccccgggatagcacgcccaggccctgtgcaaggcctctggcacttaggagaggcttttgcccctttgtcctctgagcagaagggttggcaaagagggaaggggacaggccagttctgcacctggcctttctccagaatgaaggcctccacctcccgtccgcacccacagaaagaaaagtaaactgttttcgcggctgcgcagaaagaagaacatggtacgagcagtgagtgctgcggaggggcgcagaggcccgcgccctggctggccctgtgcatgcgccttgcgccctgctcccaggtgccactaacccgtaatctggctctgtgtgcagtgctgcccggcagggctgtcgtgtgcgtgttgggtgggaaggcggaggcggcgcggggcgggctggcctctgagcatctggctgcatttagcacg

SEQ ID NO: 748 - DNA, 502 bp, synthetic construct
  misc_feature 1..502: note = Synthetic
  source 1..502: mol_type = other DNA
gagcctcctgcccctcaccaggccctgttagcatcacctcgggcacctggccacagcaggggccagtcagggcaccccgggatagcacgcccaggccctgtgcaaggcctctggcacttaggagaggcttttgcccctttgtcctctgagcagaagggttggcaaagagggaaggggacaggccagttctgcacctggcctttctccagaatgaaggcctccacctcccgtccgcacccacagaaagaaaagtaaactgttttcgcggctgcgcagaaagaagaacatggtacgagcagtgagtgctgcggaggggcgcagaggcccgcgccctggctggccctgtgcatgcgccttgcgccctgctcccaggtgccactaacccgtaatctggctctgtgtgcatgtgctgcccggcagggctgtcgtgtgcgtgttgggtgggaaggcggaggcggcgcggggcgggctggcctctgagcatctggctgcatttagcacg

SEQ ID NO: 749 - DNA, 503 bp, synthetic construct
  misc_feature 1..503: note = Synthetic
  source 1..503: mol_type = other DNA
gagcctcctgcccctcaccaggccctgttagcatcacctcgggcacctggccacagcaggggccagtcagggcaccccgggatagcacgcccaggccctgtgcaaggcctctggcacttaggagaggcttttgcccctttgtcctctgagcagaagggttggcaaagagggaaggggacaggccagttctgcacctggcctttctccagaatgaaggcctccacctcccgtccgcacccacagaaagaaaagtaaactgttttcgcggctgcgcagaaagaagaacatggtacgagcagtgagtgctgcggaggggcgcagaggcccgcgccctggctggccctgtgcatgcgccttgcgccctgctcccaggtgccactaacccgtaatctgctgctctgtgtgcagtgctgcccggcagggctgtcgtgtgcgtgttgggtgggaaggcggaggcggcgcggggcgggctggcctctgagcatctggctgcatttagcacg

SEQ ID NO: 750 - DNA, 504 bp, synthetic construct
  misc_feature 1..504: note = Synthetic
  source 1..504: mol_type = other DNA
gagcctcctgcccctcaccaggccctgttagcatcacctcgggcacctggccacagcaggggccagtcagggcaccccgggatagcacgcccaggccctgtgcaaggcctctggcacttaggagaggcttttgcccctttgtcctctgagcagaagggttggcaaagagggaaggggacaggccagttctgcacctggcctttctccagaatgaaggcctccacctcccgtccgcacccacagaaagaaaagtaaactgttttcgcggctgcgcagaaagaagaacatggtacgagcagtgagtgctgcggaggggcgcagaggcccgcgccctggctggccctgtgcatgcgccttgcgccctgctcccaggtgccactaacccgtaatctgctgctctgtgtgcatgtgctgcccggcagggctgtcgtgtgcgtgttgggtgggaaggcggaggcggcgcggggcgggctggcctctgagcatctggctgcatttagcacg

SEQ ID NO: 751 - DNA, 502 bp, synthetic construct
  misc_feature 1..502: note = Synthetic
  source 1..502: mol_type = other DNA
gagcctcctgcccctcaccaggccctgttagcatcacctcgggcacctggccacagcaggggccagtcagggcaccccgggatagcacgcccaggccctgtgcaaggcctctggcacttaggagaggcttttgcccctttgtcctctgagcagaagggttggcaaagagggaaggggacaggccagttctgcacctggcctttctccagaatgaaggcctccacctcccgtccgcacccacagaaagaaaagtaaactgttttcgcggctgcgcagaaagaagaacatggtacgagcagtgagtgctgcggaggggcgcagaggcccgcgccctggctggccctgtgcatgcgccttgcgccctgctcccaggtgctcactaacccgtaatctggctctgtgtgcagtgctgcccggcagggctgtcgtgtgcgtgttgggtgggaaggcggaggcggcgcggggcgggctggcctctgagcatctggctgcatttagcacg

SEQ ID NO: 752 - DNA, 503 bp, synthetic construct
  misc_feature 1..503: note = Synthetic
  source 1..503: mol_type = other DNA
gagcctcctgcccctcaccaggccctgttagcatcacctcgggcacctggccacagcaggggccagtcagggcaccccgggatagcacgcccaggccctgtgcaaggcctctggcacttaggagaggcttttgcccctttgtcctctgagcagaagggttggcaaagagggaaggggacaggccagttctgcacctggcctttctccagaatgaaggcctccacctcccgtccgcacccacagaaagaaaagtaaactgttttcgcggctgcgcagaaagaagaacatggtacgagcagtgagtgctgcggaggggcgcagaggcccgcgccctggctggccctgtgcatgcgccttgcgccctgctcccaggtgctcactaacccgtaatctggctctgtgtgcatgtgctgcccggcagggctgtcgtgtgcgtgttgggtgggaaggcggaggcggcgcggggcgggctggcctctgagcatctggctgcatttagcacg

SEQ ID NO: 753 - DNA, 504 bp, synthetic construct
  misc_feature 1..504: note = Synthetic
  source 1..504: mol_type = other DNA
gagcctcctgcccctcaccaggccctgttagcatcacctcgggcacctggccacagcaggggccagtcagggcaccccgggatagcacgcccaggccctgtgcaaggcctctggcacttaggagaggcttttgcccctttgtcctctgagcagaagggttggcaaagagggaaggggacaggccagttctgcacctggcctttctccagaatgaaggcctccacctcccgtccgcacccacagaaagaaaagtaaactgttttcgcggctgcgcagaaagaagaacatggtacgagcagtgagtgctgcggaggggcgcagaggcccgcgccctggctggccctgtgcatgcgccttgcgccctgctcccaggtgctcactaacccgtaatctgctgctctgtgtgcagtgctgcccggcagggctgtcgtgtgcgtgttgggtgggaaggcggaggcggcgcggggcgggctggcctctgagcatctggctgcatttagcacg

SEQ ID NO: 754 - DNA, 505 bp, synthetic construct
  misc_feature 1..505: note = Synthetic
  source 1..505: mol_type = other DNA
gagcctcctgcccctcaccaggccctgttagcatcacctcgggcacctggccacagcaggggccagtcagggcaccccgggatagcacgcccaggccctgtgcaaggcctctggcacttaggagaggcttttgcccctttgtcctctgagcagaagggttggcaaagagggaaggggacaggccagttctgcacctggcctttctccagaatgaaggcctccacctcccgtccgcacccacagaaagaaaagtaaactgttttcgcggctgcgcagaaagaagaacatggtacgagcagtgagtgctgcggaggggcgcagaggcccgcgccctggctggccctgtgcatgcgccttgcgccctgctcccaggtgctcactaacccgtaatctgctgctctgtgtgcatgtgctgcccggcagggctgtcgtgtgcgtgttgggtgggaaggcggaggcggcgcggggcgggctggcctctgagcatctggctgcatttagcacg

SEQ ID NO: 755 - DNA, 502 bp, synthetic construct
  misc_feature 1..502: note = Synthetic
  source 1..502: mol_type = other DNA
gagcctcctgcccctcaccaggccctgttagcatcacctcgggcacctggccacagcaggggccagtcagggcaccccgggatagcacgcccaggccctgtgcaaggcctctggcacttaggagaggcttttgcccctttgtcctctgagcagaagggttggcaaagagggaaggggacaggccagttctgcacctggcctttctccagaatgaaggcctccacctcccgtccgcacccacagaaagaaaagtaaactgttttcgcggctgcgcagaaagaagaacatggtacgagcagtgagtgctgcggaggggcgcagaggcccgcgccctggctggccctgtgcatgctgccttgcgccctgctcccaggtgccactaacccgtaatctggctctgtgtgcagtgctgcccggcagggctgtcgtgtgcgtgttgggtgggaaggcggaggcggcgcggggcgggctggcctctgagcatctggctgcatttagcacg

SEQ ID NO: 756 - DNA, 503 bp, synthetic construct
  misc_feature 1..503: note = Synthetic
  source 1..503: mol_type = other DNA
gagcctcctgcccctcaccaggccctgttagcatcacctcgggcacctggccacagcaggggccagtcagggcaccccgggatagcacgcccaggccctgtgcaaggcctctggcacttaggagaggcttttgcccctttgtcctctgagcagaagggttggcaaagagggaaggggacaggccagttctgcacctggcctttctccagaatgaaggcctccacctcccgtccgcacccacagaaagaaaagtaaactgttttcgcggctgcgcagaaagaagaacatggtacgagcagtgagtgctgcggaggggcgcagaggcccgcgccctggctggccctgtgcatgctgccttgcgccctgctcccaggtgccactaacccgtaatctggctctgtgtgcatgtgctgcccggcagggctgtcgtgtgcgtgttgggtgggaaggcggaggcggcgcggggcgggctggcctctgagcatctggctgcatttagcacg

SEQ ID NO: 757 - DNA, 504 bp, synthetic construct
  misc_feature 1..504: note = Synthetic
  source 1..504: mol_type = other DNA
gagcctcctgcccctcaccaggccctgttagcatcacctcgggcacctggccacagcaggggccagtcagggcaccccgggatagcacgcccaggccctgtgcaaggcctctggcacttaggagaggcttttgcccctttgtcctctgagcagaagggttggcaaagagggaaggggacaggccagttctgcacctggcctttctccagaatgaaggcctccacctcccgtccgcacccacagaaagaaaagtaaactgttttcgcggctgcgcagaaagaagaacatggtacgagcagtgagtgctgcggaggggcgcagaggcccgcgccctggctggccctgtgcatgctgccttgcgccctgctcccaggtgccactaacccgtaatctgctgctctgtgtgcagtgctgcccggcagggctgtcgtgtgcgtgttgggtgggaaggcggaggcggcgcggggcgggctggcctctgagcatctggctgcatttagcacg

SEQ ID NO: 758 - DNA, 505 bp, synthetic construct
  misc_feature 1..505: note = Synthetic
  source 1..505: mol_type = other DNA
gagcctcctgcccctcaccaggccctgttagcatcacctcgggcacctggccacagcaggggccagtcagggcaccccgggatagcacgcccaggccctgtgcaaggcctctggcacttaggagaggcttttgcccctttgtcctctgagcagaagggttggcaaagagggaaggggacaggccagttctgcacctggcctttctccagaatgaaggcctccacctcccgtccgcacccacagaaagaaaagtaaactgttttcgcggctgcgcagaaagaagaacatggtacgagcagtgagtgctgcggaggggcgcagaggcccgcgccctggctggccctgtgcatgctgccttgcgccctgctcccaggtgccactaacccgtaatctgctgctctgtgtgcatgtgctgcccggcagggctgtcgtgtgcgtgttgggtgggaaggcggaggcggcgcggggcgggctggcctctgagcatctggctgcatttagcacg

SEQ ID NO: 759 - DNA, 503 bp, synthetic construct
  misc_feature 1..503: note = Synthetic
  source 1..503: mol_type = other DNA
gagcctcctgcccctcaccaggccctgttagcatcacctcgggcacctggccacagcaggggccagtcagggcaccccgggatagcacgcccaggccctgtgcaaggcctctggcacttaggagaggcttttgcccctttgtcctctgagcagaagggttggcaaagagggaaggggacaggccagttctgcacctggcctttctccagaatgaaggcctccacctcccgtccgcacccacagaaagaaaagtaaactgttttcgcggctgcgcagaaagaagaacatggtacgagcagtgagtgctgcggaggggcgcagaggcccgcgccctggctggccctgtgcatgctgccttgcgccctgctcccaggtgctcactaacccgtaatctggctctgtgtgcagtgctgcccggcagggctgtcgtgtgcgtgttgggtgggaaggcggaggcggcgcggggcgggctggcctctgagcatctggctgcatttagcacg

SEQ ID NO: 760 - DNA, 504 bp, synthetic construct
  misc_feature 1..504: note = Synthetic
  source 1..504: mol_type = other DNA
gagcctcctgcccctcaccaggccctgttagcatcacctcgggcacctggccacagcaggggccagtcagggcaccccgggatagcacgcccaggccctgtgcaaggcctctggcacttaggagaggcttttgcccctttgtcctctgagcagaagggttggcaaagagggaaggggacaggccagttctgcacctggcctttctccagaatgaaggcctccacctcccgtccgcacccacagaaagaaaagtaaactgttttcgcggctgcgcagaaagaagaacatggtacgagcagtgagtgctgcggaggggcgcagaggcccgcgccctggctggccctgtgcatgctgccttgcgccctgctcccaggtgctcactaacccgtaatctggctctgtgtgcatgtgctgcccggcagggctgtcgtgtgcgtgttgggtgggaaggcggaggcggcgcggggcgggctggcctctgagcatctggctgcatttagcacg

SEQ ID NO: 761 - DNA, 505 bp, synthetic construct
  misc_feature 1..505: note = Synthetic
  source 1..505: mol_type = other DNA
gagcctcctgcccctcaccaggccctgttagcatcacctcgggcacctggccacagcaggggccagtcagggcaccccgggatagcacgcccaggccctgtgcaaggcctctggcacttaggagaggcttttgcccctttgtcctctgagcagaagggttggcaaagagggaaggggacaggccagttctgcacctggcctttctccagaatgaaggcctccacctcccgtccgcacccacagaaagaaaagtaaactgttttcgcggctgcgcagaaagaagaacatggtacgagcagtgagtgctgcggaggggcgcagaggcccgcgccctggctggccctgtgcatgctgccttgcgccctgctcccaggtgctcactaacccgtaatctgctgctctgtgtgcagtgctgcccggcagggctgtcgtgtgcgtgttgggtgggaaggcggaggcggcgcggggcgggctggcctctgagcatctggctgcatttagcacg

SEQ ID NO: 762 - DNA, 506 bp, synthetic construct
  misc_feature 1..506: note = Synthetic
  source 1..506: mol_type = other DNA
gagcctcctgcccctcaccaggccctgttagcatcacctcgggcacctggccacagcaggggccagtcagggcaccccgggatagcacgcccaggccctgtgcaaggcctctggcacttaggagaggcttttgcccctttgtcctctgagcagaagggttggcaaagagggaaggggacaggccagttctgcacctggcctttctccagaatgaaggcctccacctcccgtccgcacccacagaaagaaaagtaaactgttttcgcggctgcgcagaaagaagaacatggtacgagcagtgagtgctgcggaggggcgcagaggcccgcgccctggctggccctgtgcatgctgccttgcgccctgctcccaggtgctcactaacccgtaatctgctgctctgtgtgcatgtgctgcccggcagggctgtcgtgtgcgtgttgggtgggaaggcggaggcggcgcggggcgggctggcctctgagcatctggctgcatttagcacg

SEQ ID NO: 763 - DNA, 501 bp, synthetic construct
  misc_feature 1..501: note = Synthetic
  source 1..501: mol_type = other DNA
gagcctcctgcccctcaccaggccctgttagcatcacctcgggcacctggccacagcaggggccagtcagggcaccccgggatagcacgcccaggccctgtgcaaggcctctggcacttaggagaggcttttgcccctttgtcctctgagcagaagggttggcaaagagggaaggggacaggccagttctgcacctggcctttctccagaatgaaggcctccacctcccgtccgcacccacagaaagaaaagtaaactgttttcgcggctgcgcagaaagaagaacatggttcgtgcagtgagtgctgcggaggggcgcagaggcccgcgccctggctggccctgtgcatgcgccttgcgccctgctcccaggtgccactaacccgtaatctggctctgtgtgcagtgctgcccggcagggctgtcgtgtgcgtgttgggtgggaaggcggaggcggcgcggggcgggctggcctctgagcatctggctgcatttagcacg

SEQ ID NO: 764 - DNA, 502 bp, synthetic construct
  misc_feature 1..502: note = Synthetic
  source 1..502: mol_type = other DNA
gagcctcctgcccctcaccaggccctgttagcatcacctcgggcacctggccacagcaggggccagtcagggcaccccgggatagcacgcccaggccctgtgcaaggcctctggcacttaggagaggcttttgcccctttgtcctctgagcagaagggttggcaaagagggaaggggacaggccagttctgcacctggcctttctccagaatgaaggcctccacctcccgtccgcacccacagaaagaaaagtaaactgttttcgcggctgcgcagaaagaagaacatggttcgtgcagtgagtgctgcggaggggcgcagaggcccgcgccctggctggccctgtgcatgcgccttgcgccctgctcccaggtgccactaacccgtaatctggctctgtgtgcatgtgctgcccggcagggctgtcgtgtgcgtgttgggtgggaaggcggaggcggcgcggggcgggctggcctctgagcatctggctgcatttagcacg

SEQ ID NO: 765 - DNA, 503 bp, synthetic construct
  misc_feature 1..503: note = Synthetic
  source 1..503: mol_type = other DNA
gagcctcctgcccctcaccaggccctgttagcatcacctcgggcacctggccacagcaggggccagtcagggcaccccgggatagcacgcccaggccctgtgcaaggcctctggcacttaggagaggcttttgcccctttgtcctctgagcagaagggttggcaaagagggaaggggacaggccagttctgcacctggcctttctccagaatgaaggcctccacctcccgtccgcacccacagaaagaaaagtaaactgttttcgcggctgcgcagaaagaagaacatggttcgtgcagtgagtgctgcggaggggcgcagaggcccgcgccctggctggccctgtgcatgcgccttgcgccctgctcccaggtgccactaacccgtaatctgctgctctgtgtgcagtgctgcccggcagggctgtcgtgtgcgtgttgggtgggaaggcggaggcggcgcggggcgggctggcctctgagcatctggctgcatttagcacg

SEQ ID NO: 766 - DNA, 504 bp, synthetic construct
  misc_feature 1..504: note = Synthetic
  source 1..504: mol_type = other DNA
gagcctcctgcccctcaccaggccctgttagcatcacctcgggcacctggccacagcaggggccagtcagggcaccccgggatagcacgcccaggccctgtgcaaggcctctggcacttaggagaggcttttgcccctttgtcctctgagcagaagggttggcaaagagggaaggggacaggccagttctgcacctggcctttctccagaatgaaggcctccacctcccgtccgcacccacagaaagaaaagtaaactgttttcgcggctgcgcagaaagaagaacatggttcgtgcagtgagtgctgcggaggggcgcagaggcccgcgccctggctggccctgtgcatgcgccttgcgccctgctcccaggtgccactaacccgtaatctgctgctctgtgtgcatgtgctgcccggcagggctgtcgtgtgcgtgttgggtgggaaggcggaggcggcgcggggcgggctggcctctgagcatctggctgcatttagcacg

SEQ ID NO: 767 - DNA, 502 bp, synthetic construct
  misc_feature 1..502: note = Synthetic
  source 1..502: mol_type = other DNA
gagcctcctgcccctcaccaggccctgttagcatcacctcgggcacctggccacagcaggggccagtcagggcaccccgggatagcacgcccaggccctgtgcaaggcctctggcacttaggagaggcttttgcccctttgtcctctgagcagaagggttggcaaagagggaaggggacaggccagttctgcacctggcctttctccagaatgaaggcctccacctcccgtccgcacccacagaaagaaaagtaaactgttttcgcggctgcgcagaaagaagaacatggttcgtgcagtgagtgctgcggaggggcgcagaggcccgcgccctggctggccctgtgcatgcgccttgcgccctgctcccaggtgctcactaacccgtaatctggctctgtgtgcagtgctgcccggcagggctgtcgtgtgcgtgttgggtgggaaggcggaggcggcgcggggcgggctggcctctgagcatctggctgcatttagcacg

SEQ ID NO: 768 - DNA, 503 bp, synthetic construct
  misc_feature 1..503: note = Synthetic
  source 1..503: mol_type = other DNA
gagcctcctgcccctcaccaggccctgttagcatcacctcgggcacctggccacagcaggggccagtcagggcaccccgggatagcacgcccaggccctgtgcaaggcctctggcacttaggagaggcttttgcccctttgtcctctgagcagaagggttggcaaagagggaaggggacaggccagttctgcacctggcctttctccagaatgaaggcctccacctcccgtccgcacccacagaaagaaaagtaaactgttttcgcggctgcgcagaaagaagaacatggttcgtgcagtgagtgctgcggaggggcgcagaggcccgcgccctggctggccctgtgcatgcgccttgcgccctgctcccaggtgctcactaacccgtaatctggctctgtgtgcatgtgctgcccggcagggctgtcgtgtgcgtgttgggtgggaaggcggaggcggcgcggggcgggctggcctctgagcatctggctgcatttagcacg

SEQ ID NO: 769 - DNA, 504 bp, synthetic construct
  misc_feature 1..504: note = Synthetic
  source 1..504: mol_type = other DNA
gagcctcctgcccctcaccaggccctgttagcatcacctcgggcacctggccacagcaggggccagtcagggcaccccgggatagcacgcccaggccctgtgcaaggcctctggcacttaggagaggcttttgcccctttgtcctctgagcagaagggttggcaaagagggaaggggacaggccagttctgcacctggcctttctccagaatgaaggcctccacctcccgtccgcacccacagaaagaaaagtaaactgttttcgcggctgcgcagaaagaagaacatggttcgtgcagtgagtgctgcggaggggcgcagaggcccgcgccctggctggccctgtgcatgcgccttgcgccctgctcccaggtgctcactaacccgtaatctgctgctctgtgtgcagtgctgcccggcagggctgtcgtgtgcgtgttgggtgggaaggcggaggcggcgcggggcgggctggcctctgagcatctggctgcatttagcacg

SEQ ID NO: 770 - DNA, 505 bp, synthetic construct
  misc_feature 1..505: note = Synthetic
  source 1..505: mol_type = other DNA
gagcctcctgcccctcaccaggccctgttagcatcacctcgggcacctggccacagcaggggccagtcagggcaccccgggatagcacgcccaggccctgtgcaaggcctctggcacttaggagaggcttttgcccctttgtcctctgagcagaagggttggcaaagagggaaggggacaggccagttctgcacctggcctttctccagaatgaaggcctccacctcccgtccgcacccacagaaagaaaagtaaactgttttcgcggctgcgcagaaagaagaacatggttcgtgcagtgagtgctgcggaggggcgcagaggcccgcgccctggctggccctgtgcatgcgccttgcgccctgctcccaggtgctcactaacccgtaatctgctgctctgtgtgcatgtgctgcccggcagggctgtcgtgtgcgtgttgggtgggaaggcggaggcggcgcggggcgggctggcctctgagcatctggctgcatttagcacg

SEQ ID NO: 771 - DNA, 502 bp, synthetic construct
  misc_feature 1..502: note = Synthetic
  source 1..502: mol_type = other DNA
gagcctcctgcccctcaccaggccctgttagcatcacctcgggcacctggccacagcaggggccagtcagggcaccccgggatagcacgcccaggccctgtgcaaggcctctggcacttaggagaggcttttgcccctttgtcctctgagcagaagggttggcaaagagggaaggggacaggccagttctgcacctggcctttctccagaatgaaggcctccacctcccgtccgcacccacagaaagaaaagtaaactgttttcgcggctgcgcagaaagaagaacatggttcgtgcagtgagtgctgcggaggggcgcagaggcccgcgccctggctggccctgtgcatgctgccttgcgccctgctcccaggtgccactaacccgtaatctggctctgtgtgcagtgctgcccggcagggctgtcgtgtgcgtgttgggtgggaaggcggaggcggcgcggggcgggctggcctctgagcatctggctgcatttagcacg

SEQ ID NO: 772 - DNA, 503 bp, synthetic construct
  misc_feature 1..503: note = Synthetic
  source 1..503: mol_type = other DNA
gagcctcctgcccctcaccaggccctgttagcatcacctcgggcacctggccacagcaggggccagtcagggcaccccgggatagcacgcccaggccctgtgcaaggcctctggcacttaggagaggcttttgcccctttgtcctctgagcagaagggttggcaaagagggaaggggacaggccagttctgcacctggcctttctccagaatgaaggcctccacctcccgtccgcacccacagaaagaaaagtaaactgttttcgcggctgcgcagaaagaagaacatggttcgtgcagtgagtgctgcggaggggcgcagaggcccgcgccctggctggccctgtgcatgctgccttgcgccctgctcccaggtgccactaacccgtaatctggctctgtgtgcatgtgctgcccggcagggctgtcgtgtgcgtgttgggtgggaaggcggaggcggcgcggggcgggctggcctctgagcatctggctgcatttagcacg

SEQ ID NO: 773 - DNA, 504 bp, synthetic construct
  misc_feature 1..504: note = Synthetic
  source 1..504: mol_type = other DNA
gagcctcctgcccctcaccaggccctgttagcatcacctcgggcacctggccacagcaggggccagtcagggcaccccgggatagcacgcccaggccctgtgcaaggcctctggcacttaggagaggcttttgcccctttgtcctctgagcagaagggttggcaaagagggaaggggacaggccagttctgcacctggcctttctccagaatgaaggcctccacctcccgtccgcacccacagaaagaaaagtaaactgttttcgcggctgcgcagaaagaagaacatggttcgtgcagtgagtgctgcggaggggcgcagaggcccgcgccctggctggccctgtgcatgctgccttgcgccctgctcccaggtgccactaacccgtaatctgctgctctgtgtgcagtgctgcccggcagggctgtcgtgtgcgtgttgggtgggaaggcggaggcggcgcggggcgggctggcctctgagcatctggctgcatttagcacg

SEQ ID NO: 774 - DNA, 505 bp, synthetic construct
  misc_feature 1..505: note = Synthetic
  source 1..505: mol_type = other DNA
gagcctcctgcccctcaccaggccctgttagcatcacctcgggcacctggccacagcaggggccagtcagggcaccccgggatagcacgcccaggccctgtgcaaggcctctggcacttaggagaggcttttgcccctttgtcctctgagcagaagggttggcaaagagggaaggggacaggccagttctgcacctggcctttctccagaatgaaggcctccacctcccgtccgcacccacagaaagaaaagtaaactgttttcgcggctgcgcagaaagaagaacatggttcgtgcagtgagtgctgcggaggggcgcagaggcccgcgccctggctggccctgtgcatgctgccttgcgccctgctcccaggtgccactaacccgtaatctgctgctctgtgtgcatgtgctgcccggcagggctgtcgtgtgcgtgttgggtgggaaggcggaggcggcgcggggcgggctggcctctgagcatctggctgcatttagcacg

SEQ ID NO: 775 - DNA, 503 bp, synthetic construct
  misc_feature 1..503: note = Synthetic
  source 1..503: mol_type = other DNA
gagcctcctgcccctcaccaggccctgttagcatcacctcgggcacctggccacagcaggggccagtcagggcaccccgggatagcacgcccaggccctgtgcaaggcctctggcacttaggagaggcttttgcccctttgtcctctgagcagaagggttggcaaagagggaaggggacaggccagttctgcacctggcctttctccagaatgaaggcctccacctcccgtccgcacccacagaaagaaaagtaaactgttttcgcggctgcgcagaaagaagaacatggttcgtgcagtgagtgctgcggaggggcgcagaggcccgcgccctggctggccctgtgcatgctgccttgcgccctgctcccaggtgctcactaacccgtaatctggctctgtgtgcagtgctgcccggcagggctgtcgtgtgcgtgttgggtgggaaggcggaggcggcgcggggcgggctggcctctgagcatctggctgcatttagcacg

SEQ ID NO: 776 - DNA, 504 bp, synthetic construct
  misc_feature 1..504: note = Synthetic
  source 1..504: mol_type = other DNA
gagcctcctgcccctcaccaggccctgttagcatcacctcgggcacctggccacagcaggggccagtcagggcaccccgggatagcacgcccaggccctgtgcaaggcctctggcacttaggagaggcttttgcccctttgtcctctgagcagaagggttggcaaagagggaaggggacaggccagttctgcacctggcctttctccagaatgaaggcctccacctcccgtccgcacccacagaaagaaaagtaaactgttttcgcggctgcgcagaaagaagaacatggttcgtgcagtgagtgctgcggaggggcgcagaggcccgcgccctggctggccctgtgcatgctgccttgcgccctgctcccaggtgctcactaacccgtaatctggctctgtgtgcatgtgctgcccggcagggctgtcgtgtgcgtgttgggtgggaaggcggaggcggcgcggggcgggctggcctctgagcatctggctgcatttagcacg

SEQ ID NO: 777 - DNA, 505 bp, synthetic construct
  misc_feature 1..505: note = Synthetic
  source 1..505: mol_type = other DNA
gagcctcctgcccctcaccaggccctgttagcatcacctcgggcacctggccacagcaggggccagtcagggcaccccgggatagcacgcccaggccctgtgcaaggcctctggcacttaggagaggcttttgcccctttgtcctctgagcagaagggttggcaaagagggaaggggacaggccagttctgcacctggcctttctccagaatgaaggcctccacctcccgtccgcacccacagaaagaaaagtaaactgttttcgcggctgcgcagaaagaagaacatggttcgtgcagtgagtgctgcggaggggcgcagaggcccgcgccctggctggccctgtgcatgctgccttgcgccctgctcccaggtgctcactaacccgtaatctgctgctctgtgtgcagtgctgcccggcagggctgtcgtgtgcgtgttgggtgggaaggcggaggcggcgcggggcgggctggcctctgagcatctggctgcatttagcacg

SEQ ID NO: 778 - DNA, 506 bp, synthetic construct
  misc_feature 1..506: note = Synthetic
  source 1..506: mol_type = other DNA
gagcctcctgcccctcaccaggccctgttagcatcacctcgggcacctggccacagcaggggccagtcagggcaccccgggatagcacgcccaggccctgtgcaaggcctctggcacttaggagaggcttttgcccctttgtcctctgagcagaagggttggcaaagagggaaggggacaggccagttctgcacctggcctttctccagaatgaaggcctccacctcccgtccgcacccacagaaagaaaagtaaactgttttcgcggctgcgcagaaagaagaacatggttcgtgcagtgagtgctgcggaggggcgcagaggcccgcgccctggctggccctgtgcatgctgccttgcgccctgctcccaggtgctcactaacccgtaatctgctgctctgtgtgcatgtgctgcccggcagggctgtcgtgtgcgtgttgggtgggaaggcggaggcggcgcggggcgggctggcctctgagcatctggctgcatttagcacg

SEQ ID NO: 779 - DNA, 185 bp, unidentified
  misc_feature 1..185: note = May be homo sapiens or mus musculus
  source 1..185: mol_type = genomic DNA
atgttttaatggctttaaaaaaaatacatttcaccttttatagtaatgttaattctatgtatttcctgtcaatagaaatctaatttatatttcgctaaacccaagctaaaaatatatattgactgtgaaatgtgcattaaattgttattgatcatagttatcaacattatgctatgttataacag

SEQ ID NO: 780 - DNA, 133 bp, unidentified
  misc_feature 1..133: note = May be homo sapiens or mus musculus
  source 1..133: mol_type = genomic DNA
cactagatgatagccactccgcagggtgatgtctggtcagggaatgcttttaccttctcaatcttttacccattcttttctctcattttctcttgatgatgtgtctcttttctccttaactttcttttcctag

SEQ ID NO: 781 - DNA, 201 bp, unidentified
  misc_feature 1..201: note = May be homo sapiens or mus musculus
  source 1..201: mol_type = genomic DNA
acacttagccgggtgtggtggcgggcgcctgtagtcccagctactcgggaggctgaagcaggagaatggcgtgaacccgggaggcggagcttgcagtgagccgagatcgtgccactgcactccagcctgggcaacatagcgaggctccatctcaaaaaaaaatttttttattttccttactctcctctgcaatgactgtag

SEQ ID NO: 782 - DNA, 227 bp, unidentified
  misc_feature 1..227: note = May be homo sapiens or mus musculus
  source 1..227: mol_type = genomic DNA
cagcccttgctgcagtcgatttggagtatcaagaaaggaagttggtcataggagagagtagatctgaaaatgtccagtcatggttgccagagtagatattttcctaactgtggtattagacccacagtcacactttcctaatttctaatgattccctctcttcatctgcttctgaaactcttcactctgtcccctcattcctccctgtggttcctgtgcctgtccag

SEQ ID NO: 783 - DNA, 189 bp, unidentified
  misc_feature 1..189: note = May be homo sapiens or mus musculus
  source 1..189: mol_type = genomic DNA
catttggttgtatatgtattgtctcataatttaatgaccagtaattttttatcagtaatttgtttatagtattcctctatgagacatgtgttttgtttatatccttcttcttttttaatgtataatcaaattcttattattttctattttattactgtcttttcacctttcttttcctatttgtgtcag

SEQ ID NO: 784 - DNA, 198 bp, unidentified
  misc_feature 1..198: note = May be homo sapiens or mus musculus
  source 1..198: mol_type = genomic DNA
caataatgtactatcttaattgtagtatgttgtttgctacttaaaaatgtcctcatataaaggcccccataaggttgatagcattcagggttttgaatgagctatatgtacatgtatcagatgaatgtcctaaacaggtatggcagaggcattcagcatatggctgattttaagcccaactctttttttccatttcag

SEQ ID NO: 785 - DNA, 258 bp, unidentified
  misc_feature 1..258: note = May be homo sapiens or mus musculus
  source 1..258: mol_type = genomic DNA
ctaggtagctgctggtttgccatggtagatgaaatattataattcatgatgtaagattttgagtttcttacattgtaagtcacaagaatagccttgcttggaatcactgcctcccaccaccagcctcctccctcccttcctttctctttctttttccccgatgccctatccatacatggtttgcttaggatgtgtttccgggtttctctgagcttcacatttttttccttttttttttttctttgcttctcccccaag

SEQ ID NO: 786 - DNA, 170 bp, unidentified
  misc_feature 1..170: note = May be homo sapiens or mus musculus
  source 1..170: mol_type = genomic DNA
cgtggacctctgcagcggcgataccactccacaccccagagccgccacggcatccccccttccgcctcgtgggtctccctgaatttcctcctcagctgtggccccctgcgttcctggcttctcgtcgttctcttccctcccactccactcatcttgaacactctctgtag

SEQ ID NO: 787 - DNA, 197 bp, unidentified
  misc_feature 1..197: note = May be homo sapiens or mus musculus
  source 1..197: mol_type = genomic DNA
aaaatgtgatggtaaacacagatgacttttgggagtaatatccttccctgtaacaccctccataagactgcatcatgatgattacgtatcagcgtatttcacaaccagcttaaagatgcagcttatttggaaacaacactattcatagaaacctactaacctaaaatgtttttactacttttatttcttaaatgtag

SEQ ID NO: 788 - DNA, 175 bp, unidentified
  misc_feature 1..175: note = May be homo sapiens or mus musculus
  source 1..175: mol_type = genomic DNA
ccccacagacctgctagtggactctgtgatgaaaatagtgtgtggccaggctccacatgggcaactagcgaccccttggtgagattatgacacctctcgcttccccctgtgtaaccagggaagctaagcatgtttctttcacttcacccatcttcctacattttttccttcctag

SEQ ID NO: 789 - DNA, 206 bp, unidentified
  misc_feature 1..206: note = May be homo sapiens or mus musculus
  source 1..206: mol_type = genomic DNA
gctgttggtgttgattgttgtgtagccagagttagaattgtgtttggctaagaatgtacacatggaattaaaatcttagtggaggcagataaatcatgttctaacattattacttacctagtaaataagctttcttgtaggagaaatacacaaggagttacttacatgtaagaatgaagttaatatttttaacatttttccttaag

SEQ ID NO: 790 - DNA, 161 bp, unidentified
  misc_feature 1..161: note = May be homo sapiens or mus musculus
  source 1..161: mol_type = genomic DNA
tagtctagatgaaaccacaagtaatggcagctaattgatactctctttagcctcaaggcaaaaatgtccagcaaatggctgcatggcccttgcttggaatcaatatcactctctgttctcctctatttttcttgtgtgtcctcctctctgccggctttcag

SEQ ID NO: 791 - DNA, 88 bp, unidentified
  misc_feature 1..88: note = May be homo sapiens or mus musculus
  source 1..88: mol_type = genomic DNA
ttaaattgtacatttctgagtttaaatttatacagctgttgttaaatgacaatcattgatctctgttcaatttatcaatatacgttag

SEQ ID NO: 792 - DNA, 173 bp, unidentified
  misc_feature 1..173: note = May be homo sapiens or mus musculus
  source 1..173: mol_type = genomic DNA
cgaatcttgacctgagctaaggatgtgcggctcttcatgttcctgagccaggttgggtgaacttccacggccttctaggtggtaccttttataaccctcaggtggtgcattcacccggacaaactggtttgaaagtccataaagctttaacaaacaattctcttgttttacag

SEQ ID NO: 793 - DNA, 334 bp, unidentified
  misc_feature 1..334: note = May be homo sapiens or mus musculus
  source 1..334: mol_type = genomic DNA
ctgaaataatgagctgtaaggggaactaaaattcccctgggctggttcctaagtttataggcaagaaaactgaggccaaagaagtaaagtgacttatctaaagtaacacagtttagtggcagatcttgattaggatcaaaactttctgtcagcccatacattgtgcttttcacaattcttcaggttttaaattctgctaagctcacaatctgatgttgaaaagaggacatgttagtaatgactctgtccctttattttcttcaccactcccctacaaaattttaaattcttgaaatcttttgctaattgagattttcatcttgtgcaaacacag

SEQ ID NO: 794 - DNA, 177 bp, unidentified
  misc_feature 1..177: note = May be homo sapiens or mus musculus
  source 1..177: mol_type = genomic DNA
tgagtttgtatttgcttttgaagttctttcgtgattttttctccccaaaaataattagcaaaatattctgttaaaatttttgatttaacgtttctgaatttaaaactatgctgtccttaatgcttcttttcttctctctccttatgaatgtttcctctttggcaattgcttttaaag

SEQ ID NO: 795 - DNA, 259 bp, unidentified
  misc_feature 1..259: note = May be homo sapiens or mus musculus
  source 1..259: mol_type = genomic DNA
ccgtggatatgttgacatctttaaaacatttcttttagccttgtacagtggttaattttaatgatttccatatttgatgttgtttttgatcttcttttcattttgtttcctgcttttcgcattctcctccccacccctccctcttctccatcccatttttcactgtcgggtcgtatgtgtctgtgtgtgttgtgtgtgttggtttctgttgtctggtgttctctcctctcttctcgtcctcacccttctgctgctgtag

SEQ ID NO: 796 - DNA, 200 bp, unidentified
  misc_feature 1..200: note = May be homo sapiens or mus musculus
  source 1..200: mol_type = genomic DNA
ataatgcagaaagacttcatgacctaaaaaatccataatggagttaaagcttctaggagacatgaacctgacctcacaagaaaaccaaagatgtttaggatgtatcgtttgtggctataccatagtataatagcaaccaactaggtcatctgatgtatgatctcagaaaacagccccctttttatcccctaaaaaatcag

SEQ ID NO: 797 - DNA, 240 bp, unidentified
  misc_feature 1..240: note = May be homo sapiens or mus musculus
  source 1..240: mol_type = genomic DNA
gtgtcctgatgactttgagaagacaagcataggtctattctcataggtaatgattctcacaactttatcctggagattaacctggggtcttggttttagttctttttcctcttccttgcccttaccagcagttacacctatgaatttgggtggctgggtgattggtatttctgacagtgatttatgtagggtggttttgtttcccatttttacctttataacttttcactcttttttcag

SEQ ID NO: 798 - DNA, 211 bp, unidentified
  misc_feature 1..211: note = May be homo sapiens or mus musculus
  source 1..211: mol_type = genomic DNA
atatatatataactatatatataactatatatatgtatcccctagtattggatcatgaagagctcttcatgcattctttgcaaaggaggttataaagttacgccctcagaacatttataactataagaatgtgccagttaaagtgctcaacaggaaatatgacagtttaaaagcattgtaaaactcacatagcttacttctctctctaaag

SEQ ID NO: 799 - DNA, 219 bp, unidentified
  misc_feature 1..219: note = May be homo sapiens or mus musculus
  source 1..219: mol_type = genomic DNA
tattgcttctaacctggattgaaatctatgactttttataacagtcattgagtctgtttcaaaggaatcttgtggtaagtatttttgcatgatgtactcaaggtatcaagtttaacaattgactttttttcattggaaagcatatgtgattaactagcatggattgcttcttgacctgcttgttttgtgtttgtctttttcttctaatataataaccag

SEQ ID NO: 800 - DNA, 179 bp, unidentified
  misc_feature 1..179: note = May be homo sapiens or mus musculus
  source 1..179: mol_type = genomic DNA
tctgttttcatgtcttcaactaatttccagtgagctcttgtgttttaatcatgctatcttggccgtatgaaagtataacactaagaaaaaaattcatttttttcaaacgtaaccttccattctttctccctttcctctaaactaaaaccttctttcccatcttttctttcttgaaccag

SEQ ID NO: 801 - DNA, 231 bp, unidentified
  misc_feature 1..231: note = May be homo sapiens or mus musculus
  source 1..231: mol_type = genomic DNA
agacatagaaacagacttcctaggtaacagtcccagctcccaaatcctcaggcttccgctccagcaggcagccttgtgtccgtaggcagcacccactccccttgcttttgagttcacctttctgtgttgatacagttctcccagtgtacccctccttgtttgagccagtctccatgtttgtctttatgtctttatgctcatttcttcatttcctcctctgcttcccgtcag

SEQ ID NO: 802 - DNA, 188 bp, unidentified
  misc_feature 1..188: note = May be homo sapiens or mus musculus
  source 1..188: mol_type = genomic DNA
atgtgtctcggtaattcaggcaaaaggactggatttttaaaagcagtttgaatttctttcatatcactagtgaagcttagtatgttccagaattcaaggagcctaaattgtatgtggattcctactcgtttattctctccatttgtatcttcctctattctctctcccaaacctgctcctctgcctag

SEQ ID NO: 803 - DNA, 181 bp, unidentified
  misc_feature 1..181: note = May be homo sapiens or mus musculus
  source 1..181: mol_type = genomic DNA
tcttggcctagaactctaaagagagaaagcaggttatttttaattactgcatctactgccctttgtattgttcttgttgtgtgggcgacttcctcctattgtccctgcccagttcctcaactgcctgagtgtttcccaaatgttctttctggatgcaccatttacccttttgtgttttcag

SEQ ID NO: 804 - DNA, 177 bp, unidentified
  misc_feature 1..177: note = May be homo sapiens or mus musculus
  source 1..177: mol_type = genomic DNA
cagaggcagtgggtgcacataggaatgggtgtgtgaaactcagcttgcaatacatgctggccaaagagcacactgctctgctgccctttagcactctgttcagcctgctttcatacagtcttctgctgaacctttcttctctcctttctctctgtgttttgtgcccccttgtggtag

SEQ ID NO: 805 - DNA, 258 bp, unidentified
  misc_feature 1..258: note = May be homo sapiens or mus musculus
  source 1..258: mol_type = genomic DNA
gtgtcctggcaagacccccagaaccaaagaatttactgttttcctcactggctcgcagctttgagctcaaggcatgtcttaaaacagtgcaactcacttcaaatgctttttgcttttcatttattattgcttgtcacgcgatgttctttgaaagcttgctcatatattatctgttccattttttttccattttccctttttttgcatgccgttcctcctgtttcttcccttcctccaatcctctgttcccgtctgtag

SEQ ID NO: 806 - DNA, 189 bp, unidentified
  misc_feature 1..189: note = May be homo sapiens or mus musculus
  source 1..189: mol_type = genomic DNA
tgcagtgtaaccaggagccagataatcctttctggctccaaagacaggggtttctgtgttgtcctgagacatgggtctcctttctttgccttcttgagtgcacaggcatgggactgcatgattgaggcatgtatcaccatgtgtgactcctgggataatccttgtttcttctatttctgttctgtgcag

SEQ ID NO: 807 - DNA, 254 bp, unidentified
  misc_feature 1..254: note = May be homo sapiens or mus musculus
  source 1..254: mol_type = genomic DNA
ggttggcctctcaacagatggcctgcaggtctcctggcctcagttaagccagggccccaggggtctgacactgagtttttcaacgtctgttctctttttctttctgtctgccttgccccacttctgtccctccaccctgggagcaccatcgccgctggggtttctctctcgtttgctctgctttcctgctgctgctgctcctgtctcaagtgtatcaaggccttcttctcatgacttttctttctgtctttcag

SEQ ID NO: 808 - DNA, 201 bp, unidentified
  misc_feature 1..201: note = May be homo sapiens or mus musculus
  source 1..201: mol_type = genomic DNA
tttgggagctggggagagccaccactgggtgacacttggatctctctggctccatcccgcccactcaggcagctcccctcaggtccctccgtaggcactgctgtaggtgtgaagatgtgtgtctacttgtgccctcatgtgatgttctaagactaactgcacgctgtgtttgcacgcttcctctcgtggctgttgaaacag

SEQ ID NO: 809 - DNA, 212 bp, unidentified
  misc_feature 1..212: note = May be homo sapiens or mus musculus
  source 1..212: mol_type = genomic DNA
ccagggaggggctctctgcattgaatggactttcccagatgacatgtctgtcaccctctctagggtaaaggtgttttacatctttatttactgcttttgtgaagctggggggaaactgctattgcaaaacaaagtctgtttatgtaactgcaatgtatacaactttgcacaaattcttagtggtaatttcaactaacatttctatccaacag

SEQ ID NO: 810 - DNA, 227 bp, unidentified
  misc_feature 1..227: note = May be homo sapiens or mus musculus
  source 1..227: mol_type = genomic DNA
aggggccccaggaacacttggtcccctcacatgaaacctcttctcagtgtcagtcaccactcaccccctccttctccatgggattatttttctttctgtttgagtttttctctcttgctcgatgacactcttttgtttatttctttgcttccccgtaactctgttgggctggactttggcctctcttgtttcttcatgtggcttctctgcttcttggttcactggag

SEQ ID NO: 811 - DNA, 226 bp, unidentified
  misc_feature 1..226: note = May be homo sapiens or mus musculus
  source 1..226: mol_type = genomic DNA
tattaataaatgttttacatattaatgatccttttgacgtgactggatccccacccttcatttcatgtgcttctattttcctacatcttttacatgactaaggattaatgaaatcacctcttcataatcatgaccataatttcatccaacaagtactcaagtttggtgttagcactttattaatgcttacgacttctctctctctccctctttctcttttccttag

SEQ ID NO: 812 - DNA, 173 bp, unidentified
  misc_feature 1..173: note = May be homo sapiens or mus musculus
  source 1..173: mol_type = genomic DNA
atcctcactgcccacctcatctcacctccacctcttcccttctccattcccctttggttcaccctttggcagaaggtactggtggctcagcctgcatgccgctgtctctcctctcgtgctggcatgtcatggtggcactgttgtgttctcttcctcttcctttttactaacag

SEQ ID NO: 813 - DNA, 228 bp, unidentified
  misc_feature 1..228: note = May be homo sapiens or mus musculus
  source 1..228: mol_type = genomic DNA
taagttttcaggtgttatctttagagtgaggtttttctttttttttttttcttttttttttctggaaactttgagtcacccccttctggggcctaatttatctactttgccttggcacttgtgaaagaaaagtaacttcttcaagttgctgtgttaggcaaaacctaaagtgtaattttactttgtgtacatttactcatcaaaattcttttggaaattaaaatatag

SEQ ID NO: 814 - DNA, 206 bp, unidentified
  misc_feature 1..206: note = May be homo sapiens or mus musculus
  source 1..206: mol_type = genomic DNA
agaagacataaatatcaaactttttacgtaacttagctatactttaaacatgctaatatccagtgcaagtagaaaagcagggcactatgaaggaaatgtttgctatatatctgttattcatgctgttgattttgagtccaaagtcagtgtccttacctgttgacatctgtattctttctctcataattctaactctttcactatag

SEQ ID NO: 815 - DNA, 210 bp, unidentified
  misc_feature 1..210: note = May be homo sapiens or mus musculus
  source 1..210: mol_type = genomic DNA
ctttagtgccatcttgtggccaatgtaacaaaatccagtgaaaaattttaaaaattgttcagaatgcattttatcttacaaaaaaggaagaaaggaaagaaggagttctctaataaaaagcttttttttaaaagagcatgtttcttataacttttctaacaaatcataaccaattaaagccacctacttaatgttctttttttcttgtag

SEQ ID NO: 816 - DNA, 208 bp, unidentified
  misc_feature 1..208: note = May be homo sapiens or mus musculus
  source 1..208: mol_type = genomic DNA
gtctccgcacgctgctgctggctgagctgacactcggtgagtgtgatgccacatctgggggaccccaggaagcctgggttggggacagggtggggagagggctagaaagaagaggcagggcttccccgtgtgcctgtctaactcagtgtccggcctgaggggtgttccttgcgccctgccctgggcactaacaggtctgtccttgcag

SEQ ID NO: 817 - DNA, 209 bp, unidentified
  misc_feature 1..209: note = May be homo sapiens or mus musculus
  source 1..209: mol_type = genomic DNA
ttctttgctttgccttctgcctggagcactttgtccctcgtgtcttttgcctcattaaagttctactggtcctcctgtttccactctttccttcttccaccctcattttacacttacttagcaggttcttctttttaattccatgcttcttgcagattttgtattctgtgtgtctattttcttgtttttcttttcttttttccctctag

SEQ ID NO: 818 - DNA, 182 bp, unidentified
  misc_feature 1..182: note = May be homo sapiens or mus musculus
  source 1..182: mol_type = genomic DNA
gcccctaagctccttttttcctagctcccccatcccccacttcatctcaaaatgctattcttgcctatatgctgtgtaaaaagtgcctttttctttttatatgttgatagatggaatggtcctttctcttgttctctctctctcttgctgagcaagctgtcacaatctctgattccttgcag

SEQ ID NO: 819 - DNA, 159 bp, unidentified
  misc_feature 1..159: note = May be homo sapiens or mus musculus
  source 1..159: mol_type = genomic DNA
tgcatgcttcttctttttttttcatgtaagatccagccctgagccttgaaaggaaagattaaattaatagcaagaacctgtttatatgctttttcatagtgaatgaagattttgtcaaaatataaattaagacatatttgctgtattttctgtactcag

SEQ ID NO: 820 - DNA, 227 bp, unidentified
  misc_feature 1..227: note = May be homo sapiens or mus musculus
  source 1..227: mol_type = genomic DNA
tttattaataaaaatattcattccttctactaatttgaatgtaatgtaggctactaaaattgtgtgtccctgtgccttgaaataatctatatcttctatggctatcagttttgtgatcttttaaaataatattgctacagattggaaaggtatatcaagtatcgtttaatttaccaatggtgagaaataaaaatgaatgacatagtgtttatttttttttcaactag

SEQ ID NO: 821 - DNA, 129 bp, unidentified
  misc_feature 1..129: note = May be homo sapiens or mus musculus
  source 1..129: mol_type = genomic DNA
tcatgcactttcatggaattgttctccctctccactcttcctcatggtctgtggtgctgggcactgagcctcttcaatttgtctgtcattatgaccaagcgacataacccatttccattctttccctag

SEQ ID NO: 822 - DNA, 171 bp, unidentified
  misc_feature 1..171: note = May be homo sapiens or mus musculus
  source 1..171: mol_type = genomic DNA
cccttctctgcctcagtccctgggctccagggctcagctccacagccctctgcctagcaggctggttctccctgccaagcccatacctgtggtcacctggccctcctgtggtctgagtaccactcccctgccccaggagccactcccactccagctgcctgtttccagcag

SEQ ID NO: 823 - DNA, 199 bp, unidentified
  misc_feature 1..199: note = May be homo sapiens or mus musculus
  source 1..199: mol_type = genomic DNA
attcaaaatgttgtgtgtgttctctgatttcttttcttacagcttgccagtatttgccgtgctgaaatgttttaatttataatttccttcctttgtaccttttagttttctctgttgctgctttttctgtgacacgagcctttcattatagtcactcttcttttttccttccccacttctttcttttccttttttaaag

SEQ ID NO: 824 - DNA, 211 bp, unidentified
  misc_feature 1..211: note = May be homo sapiens or mus musculus
  source 1..211: mol_type = genomic DNA
ataggggaatgcccagttggcctttcttttgtttaaaaaaaaaatgttagtggaaaaatgtgtgccactcttgaatggaaatatgattctagacagccagacttacagttggaaggttattagaactctgttcgcttttttagtcttaattttgatttttcaaatgttttgtttcttggttttaatttttggtttgatctgttgttccaag

SEQ ID NO: 825 - DNA, 150 bp, unidentified
  misc_feature 1..150: note = May be homo sapiens or mus musculus
  source 1..150: mol_type = genomic DNA
gcaccaactcattacaggatggaggggcagaacgcccagagcacccctgggctcacgtgcggtacagctgcaggagagagctgtccttttggttttatgtttttaattaattctgtttcctcagattgatgattaaatttatttttccag

SEQ ID NO: 826 - DNA, 231 bp, unidentified
  misc_feature 1..231: note = May be homo sapiens or mus musculus
  source 1..231: mol_type = genomic DNA
ttgcagtgagccgagattgcaccactgcactccagcctgggggacagagcgagactccatctcaaaaaaaaagaaagaaaagaatgccagggttaccctagaagagtggtcatcaaagagtaggacgagtcaagtgtgaacttctaaccagaactgaccttctgtgtgaaagtaggaagttctcttttccttccaaagctcttctacttctgcctgtccttttctttgcag

SEQ ID NO: 827 - DNA, 142 bp, unidentified
  misc_feature 1..142: note = May be homo sapiens or mus musculus
  source 1..142: mol_type = genomic DNA
agcttcctcaggcgtgtttttacaaaatcctagagcaaactttctcataaaatttactcaaactttatttaaaaatgcaacagaccaatcaaaaaaaatcttgacactatccatattaataaaaatctgtttgccaccacag

SEQ ID NO: 828 - DNA, 206 bp, unidentified
  misc_feature 1..206: note = May be homo sapiens or mus musculus
  source 1..206: mol_type = genomic DNA
tgaccctgtttctcagcgtggggagtgtgtgatcctgtttcttgtctggtaagttgcttagtcgtgatggtcaacagttaatgcttaatggtggcacttctgctagacttttgtgcagtttttataaaatagccttgtaacttttcatggtttttaaaaaagtgatatgtttttgtttggtcttgatggtcctgttcccatttcag

SEQ ID NO: 829 - DNA, 221 bp, unidentified
  misc_feature 1..221: note = May be homo sapiens or mus musculus
  source 1..221: mol_type = genomic DNA
aggccctctggctccagactctaaattatactctgaatgatactcactgattgtccgaggacacaaagagtgtcgaggcactatctgctgggtgtctgcagaaccttactgttctaaagcaaaacattttacccctggacaagagcagcaaaggtggcgttcggccctccttggctctcatttgactgttcaaagccaggtgcttttctttcttgggtcag

SEQ ID NO: 830 - DNA, 68 bp, unidentified
  misc_feature 1..68: note = May be homo sapiens or mus musculus
  source 1..68: mol_type = genomic DNA
gtaagggaagtggaggaagacagggctggggcttcagctcaccagaccttccctgacccactactcag

SEQ ID NO: 831 - DNA, 206 bp, unidentified
  misc_feature 1..206: note = May be homo sapiens or mus musculus
  source 1..206: mol_type = genomic DNA
cagagatccttctgggggccactgctgggtgggcaggcaggagtgggcttccagaagcctctggccctgcccccagcctctctgtgcctgtcctttgtcccatctctctggctcatctcaatgcccttgactcagcggaccacgctcttcactgtgttgtgtctcccccatccccgccccctctccggctctgtcttctctcttag

SEQ ID NO: 832 - DNA, 188 bp, unidentified
  misc_feature 1..188: note = May be homo sapiens or mus musculus
  source 1..188: mol_type = genomic DNA
cttggttactaaacttttcttcttttttccaggcaggtaagggggacgtgctggggtggaggttgggagcagggcatcacatttccttacgtggcaaaggatcacgtctgaagagtgacttttctgtttccacaatatgtgctattgacttctttctcatgggtcttgctgtgacttttctttctgag

SEQ ID NO: 833 - DNA, 244 bp, unidentified
  misc_feature 1..244: note = May be homo sapiens or mus musculus
  source 1..244: mol_type = genomic DNA
ctaccaagtagcctcttaatagaaatgtagaaaatatacaggacagggtggagatgagctcttgaatttagtagggtgaaagagttaactgccaacccggcactatcattgtacttgtttggagaaaatctgttttgttctggtgatgatggttttatcttcccttttagttgggtgggaagtaacagaaaatttgtttccccaaaagtttgacattttcttgttaatacacgtttcatttcag

SEQ ID NO: 834 - DNA, 208 bp, unidentified
  misc_feature 1..208: note = May be homo sapiens or mus musculus
  source 1..208: mol_type = genomic DNA
tgctcactgaagtcaggcttgaaacggctgttcccaaggtggcttgaggtagaggaggggctcagggccctctccgatgcccccttccccatccccatctgacgtccccctcctggagatgaagggcttcttccctgtaccccaaggggcggcctgcctggcccctggataaacgctgcttgtgtttgtgcggccgacatctcgccag

SEQ ID NO: 835 - DNA, 149 bp, unidentified
  misc_feature 1..149: note = May be homo sapiens or mus musculus
  source 1..149: mol_type = genomic DNA
atgagcagctaaggacggtcctgggtgctcactgaagtcaggcttgaaacggctgttcccaaggtggcttgaggtagaggaggggctcagggccctctccgatgcccccttccccatccccatctgacgtccccctcctggagatgaag

SEQ ID NO: 836 - DNA, 201 bp, unidentified
  misc_feature 1..201: note = May be homo sapiens or mus musculus
  source 1..201: mol_type = genomic DNA
tggaggagatgtcaaagtggttttccttgaatgctctgtgagcatacggttgttggatggattggaacgctactctcactcaatagactctctctctctctgtgtctttgtgcatggcttcccgccaaataattcaccagcttgactgcatcacagacttgacgtgtcacctttctcgtttgtgtcctttgtcacccacag

SEQ ID NO: 837 - DNA, 210 bp, unidentified
  misc_feature 1..210: note = May be homo sapiens or mus musculus
  source 1..210: mol_type = genomic DNA
tcctaataaccgtctctgctttaccaaacaagagcacctggttttctattttatttcccattcttttcgtttccaaactctgagattccttcgttcttcctcctccctgtctcctctgcctacgattttgtctaacaagctgtgaatgtttatgtgcctgagtttgtgtctctcttttgtgcttgactctgcctctctttgttcactcag

SEQ ID NO: 838 - DNA, 215 bp, unidentified
  misc_feature 1..215: note = May be homo sapiens or mus musculus
  source 1..215: mol_type = genomic DNA
ctagtttttatgctgggctagtgattcatttttatttcccttgaatgtgtttccccatcctttcccccatcattatgtttaattatttcctccacgctttaaataggccagacctcttattattgctgtttgcgttgttgtttgggttcgcgctcctaatcacacacaccgggagatcctcctatgaagctaacttgtttttgcctccaaaatag

SEQ ID NO: 839 - DNA, 167 bp, unidentified
  misc_feature 1..167: note = May be homo sapiens or mus musculus
  source 1..167: mol_type = genomic DNA
ggggcagggcggggcggggggccgatgggacctaacctgtcttccactctgctctgtctcctgtaccccaacatttcctcttcctcctcctcctcctcctcgtttcctcctcctcctcctcctttcctcctcccctgtcacccctcacctccctcctcacactgcag

SEQ ID NO: 840 - DNA, 139 bp, unidentified
  misc_feature 1..139: note = May be homo sapiens or mus musculus
  source 1..139: mol_type = genomic DNA
ccttgggggtggcactaaccttctttgggggtgggggcggggaccgagtctgtggccatccctaagtccgctccttgcgtcctcctctgcctgccccttaactcaccccttctctcccctcttcctactaacgggtcag

SEQ ID NO: 841 - DNA, 171 bp, unidentified
  misc_feature 1..171: note = May be homo sapiens or mus musculus
  source 1..171: mol_type = genomic DNA
tggcacgtcagtcagtgagacctcagcatggataggtggctcagtcatcagaactccccagcgcgaacaatgtcgtaattacattaaccaaatgtgactgacattttgtgagtttatctgtcttcattaaacttgttcaccttctctgaaacccttcatgctgcacgctag

SEQ ID NO: 842 - DNA, 243 bp, unidentified; identical to SEQ ID NO: 15
  misc_feature 1..243: note = May be homo sapiens or mus musculus
  source 1..243: mol_type = genomic DNA

SEQ ID NO: 843 - DNA, 245 bp, unidentified
  misc_feature 1..245: note = May be homo sapiens or mus musculus
  source 1..245: mol_type = genomic DNA
ttttaactattctgggttgtatgcttgcatctttaaccataggaagcctattgcatgcactagatgattgagtgacctggtggatttcttgttttgttttcgattttttttttttaatactaaccagaacatgtgttttttaattgtgaatagtactttagctttagctattcatagaatgtatttgcttgactaacttatggccttttttgctaatgcttcatggttgtcctacaaccatttag

SEQ ID NO: 844 - DNA, 210 bp, unidentified
  misc_feature 1..210: note = May be homo sapiens or mus musculus
  source 1..210: mol_type = genomic DNA
taatccatctgcaatgatttctttgccttgtctgtaccatttgacgataggttttggatgaccagtcactttgcagaccaaggtagcattgctctgatatctgacatttagatttctcagttcctctttaaagtgtggtgcctgaattgggacatcagatttgggagtgatgggttctgatatttcactccattcactttccccacctag

SEQ ID NO: 845 - DNA, 195 bp, unidentified
  misc_feature 1..195: note = May be homo sapiens or mus musculus
  source 1..195: mol_type = genomic DNA
taaaaatatcatatgggatacacctgaactttaatctttaaatattgaagtttattttcccttaacgcttaataaaataaaaaagaaaattgggtgctcagactacccaaatagaaactaccctgaagtataaaagatttagggaatcacctgttttcccttgacatcatctgccttttttgccatttcccccag

SEQ ID NO: 846 - DNA, 261 bp, unidentified
  misc_feature 1..261: note = May be homo sapiens or mus musculus
  source 1..261: mol_type = genomic DNA
tggtaccacatggtttgggttcaatgctgatgcaagtgggccagagacggctcccctggaagccccataggcaggctgtgggtgctggggtcaccgaggtcccccgcgttctggagctgaagaccttcaccaccctgcttgtggccacacacccactgctggccaccctggcctgtgaaaggcgtgcctgaccctctggagacaaacctgttcttctgtttctctgtctctccccctcccccacgcttccctcccccatag

SEQ ID NO: 847 - DNA, 167 bp, unidentified
  misc_feature 1..167: note = May be homo sapiens or mus musculus
  source 1..167: mol_type = genomic DNA
ttgccagctgctgccgccgccaccaaaactcccagaacaggactcttcttctcttagaggctcgtgtgctccagcaccctctccccactccttttggaggtccagaccacttccaggctctaatctgtgtctccttgcccttttcctggcccggcctccaccctaag

SEQ ID NO: 848 - DNA, 221 bp, unidentified
  misc_feature 1..221: note = May be homo sapiens or mus musculus
  source 1..221: mol_type = genomic DNA
aattctgtggccctgctcaggggagctatgcattgggtgaaatctctgatctttcatacctatctgatacccattcttgaagaaaaaactcacagtacagaagtttctcgattactgtttgtctgaaagtgcagctggttaaccttgctttcctcttctctatgttccttctcttctctttcctcttccccttgttcgtcaatttctattctctgtttcag

SEQ ID NO: 849 - DNA, 156 bp, unidentified
  misc_feature 1..156: note = May be homo sapiens or mus musculus
  source 1..156: mol_type = genomic DNA
gcagtgcagtagatatgaagaattattttccttaagttggaatagatggctctttggtcagatgcacatgtatatatagttctgtctagacatgaaaaagatttgtttttgtgagttctctgatgattagaatttttttctgttgtgtatccttag

SEQ ID NO: 850 - DNA, 179 bp, unidentified
  misc_feature 1..179: note = May be homo sapiens or mus musculus
  source 1..179: mol_type = genomic DNA
cctatttcttcattttggaatcattaagagtaatgatatggttttagaattcttaacacaaaaatgccctgcattgatataactggccagtacaaacgatgctttttttatatccctgttagctattaaaattctatgctgaaatttgatttcctcttatttacttttgctgcaagaag

SEQ ID NO: 851 - DNA, 220 bp, unidentified
  misc_feature 1..220: note = May be homo sapiens or mus musculus
  source 1..220: mol_type = genomic DNA
gaaagacatttgtgcccaaaatattagaggttcctgatgataaaagtaatagtttaaaaaaagaaactctctattaatatgtttttataaatcaggaggcaaaaacataaactgttgagtttcagtgttgtatattattttaccatcatgttcatttgtcttcacagtttggctccccccttccccttttcacccacactctcctgttttgtgttgttag

SEQ ID NO: 852 - DNA, 223 bp, unidentified
  misc_feature 1..223: note = May be homo sapiens or mus musculus
  source 1..223: mol_type = genomic DNA
ttgctgtagtttgttgagttttggcatggccccatgaggcagatagtactattcagttttagatgcttctacagactgactccgtggcagagtcaggttgccatgcagtaatttcagaaggagcccctattggccattttctacaaccttttttcttattccctctctttttctcccttctctggctggctgtgattctgtaattctttctgattcattccag

SEQ ID NO: 853 - DNA, 167 bp, unidentified
  misc_feature 1..167: note = May be homo sapiens or mus musculus
  source 1..167: mol_type = genomic DNA
cttacagtgtgggattttaataagaggctaaattgaaagatattgcccatcaattgtaacttcttaattaaaatataacaaaacagaacaaactatcaatttcatttctatgtcttattctttcatttcatgtggacacatatataccttttctttctcctataaag

SEQ ID NO: 854 - DNA, 208 bp, unidentified
  misc_feature 1..208: note = May be homo sapiens or mus musculus
  source 1..208: mol_type = genomic DNA
atgttttaaattacatggctgtcctttagggatttgtttttcatactacaaggaaatatcgtccatgtagttggtgccaatgtgaaacttttctatgccacaagcctttttttgaaatcataagaaaatatacgtgtgtgagcttttcaaataatttctgttgtttttttgtcatttgcataataaataattggaaacaacttaaaag

SEQ ID NO: 855 - DNA, 200 bp, unidentified
  misc_feature 1..200: note = May be homo sapiens or mus musculus
  source 1..200: mol_type = genomic DNA
acaatttagttatagttactcaaagtaaaggtatgaagaaccactggttttaaccctgcaagaatatatttactaaaagggtttttttaaagcaaaattaacatccaattggtagaataaatgggtgagatatttgtgaacagaaactcttcaacagtgtcccttgtttattcttctttatcatatactttctcatccag

SEQ ID NO: 856 - DNA, 194 bp, unidentified
  misc_feature 1..194: note = May be homo sapiens or mus musculus
  source 1..194: mol_type = genomic DNA
taattccatttttaatccatttggaatgctgaaagctacaaaaatgtatttcctgtcagtaaacatttgttgttttatttttgtgtttaattaaaagtttatttttcccctttaaatctttgaaggaaagaaggtttttttgtttttttgtttgtttttgtcagaatagttcatggtaaactttgcaattacag

SEQ ID NO: 857 - DNA, 192 bp, unidentified
  misc_feature 1..192: note = May be homo sapiens or mus musculus
  source 1..192: mol_type = genomic DNA
tctcttctggagatgtatatccatgtaactctgtatttcctcccatatctgactgtttgtttccaatcttttgactgctttcttgctttttatgcctttatctttgcttatttgaattaggtacttctctgctacctttcacctgctctttttctgtgccattgtttcccttgctaccttacctaaaaccag

SEQ ID NO: 858 - DNA, 179 bp, unidentified
  misc_feature 1..179: note = May be homo sapiens or mus musculus
  source 1..179: mol_type = genomic DNA
ggccaagactgtgaatgtcatcttttcttttggcagaccaattttgcttttcctgttcatcacagactttcccttttggttaagtttctttatcggctttatttttgtttcctccctcaaacctcctctcccttttctttctgctcttttattacttctcttcccctcttcctctgcag

SEQ ID NO: 859 - DNA, 200 bp, unidentified
  misc_feature 1..200: note = May be homo sapiens or mus musculus
  source 1..200: mol_type = genomic DNA
ttacagttctctgaactacagggaaacatgcatctcttactattgaacatatttagcttactaattttctgtattttgaatgtgtaactttgagtcagctatcattgttttttagggaaaatgtgtatgattaatttaaggtttttggagaatgcaatatgttagaaactatttggtttatgaaatttttgcatttctag

SEQ ID NO: 860 - DNA, 216 bp, unidentified
  misc_feature 1..216: note = May be homo sapiens or mus musculus
  source 1..216: mol_type = genomic DNA
ttaaaatggaagaactgtcaggtactgttagtgcctgagcctttgcagcagtttgtttgataggtacaagagaactgatatgcctgttttctccagttctctttatctttctttagcagttctatttgaatgttttctatctattcgtactcatttttactccttctgacccttcttttctatttcccccttctctgccttgttcttctttttcag

SEQ ID NO: 861 - DNA, 200 bp, unidentified
  misc_feature 1..200: note = May be homo sapiens or mus musculus
  source 1..200: mol_type = genomic DNA
ctcgtgactcacggcatgctgaatggttaatccagtagatctccaattttgaagctcctttttcttttatcctgtgtttatcccaaaatactctgtggctattttcctttgagctaatgtaacgttttcctctaacctatgacctttaacctctttacctctgacctaagcctcttgcatgcccaaatcctcttttatag

SEQ ID NO: 862 - DNA, 210 bp, unidentified
  misc_feature 1..210: note = May be homo sapiens or mus musculus
  source 1..210: mol_type = genomic DNA
attaaatttataatttctgtggcattttttttctttttttttttttttttttttttttagcatttctgttttgttgtctgtgccagaatctagcacttacaggaacattagttctcttagctcctttgatggtcactgatttgttcttagagttaaaaaatcctctgctcatttttctcattcattttgcaccccctttcttctcttcag

SEQ ID NO: 863 - DNA, 178 bp, unidentified
  misc_feature 1..178: note = May be homo sapiens or mus musculus
  source 1..178: mol_type = genomic DNA
ttgtacactctgggtctcggttccttgctctttgtgaccaatggagggggcagaaccaaacgcagtgtgaaaccaaagttcaccctgtggatcagctggcgacgctggggttctgtggaagacaatacctgaagcttacctatgttctttctttcactgctgctttggatgtactcag

SEQ ID NO: 864 - DNA, 225 bp, unidentified
  misc_feature 1..225: note = May be homo sapiens or mus musculus
  source 1..225: mol_type = genomic DNA
ttagcagcttttgtaaagtacaataacaaatctccctcacaaatgagagaaactaaaaggacttgttaaataaaactccaaacttaagtctgcttctaggaattgtatttatttatcgtttcaagtatatcttttcatactgactatgagtaaagcaaagcaatagattgtttgaaagtctatagtttatgatgagctttgtcttttcttttcttcttacttcag

SEQ ID NO: 865 - DNA, 253 bp, unidentified
  misc_feature 1..253: note = May be homo sapiens or mus musculus
  source 1..253: mol_type = genomic DNA
ttgtttgaatgctgatcaagaataaggtcttttgcatgctgcttctgggtagggaggttcctatctcatggcctcgccagggagatctttcatcagagatattgtcagctgcaactctgacagcagttaacatcgctttagctcttgtcactatttcattttgtcagctggctcactctgctctgtccttcacactagaaagaatgtacttaccaatgcgaactgtttctttctctattttgttctcactcag

SEQ ID NO: 866 - DNA, 155 bp, unidentified
  misc_feature 1..155: note = May be homo sapiens or mus musculus
  source 1..155: mol_type = genomic DNA
agccaccgtgaagtgcctccacgcctcctccaggcagcctttggggctgacgcagcccagcctcgatctgtaccttgggggtctcccacatcctgcctcgtgcccggcggggctgcctcgggggcgtgcctgagccgggtctcttgtccccgcag

SEQ ID NO: 867 - DNA, 131 bp, unidentified
  misc_feature 1..131: note = May be homo sapiens or mus musculus
  source 1..131: mol_type = genomic DNA
tcctctaatctttccgtcaatctcgtcgtgggtaaagatgcctttattaacagtagtgatgctgttggtttcgctcactaatggctttcttgtgcgctgtgtggctgtgtattttgtctgccattgtacag

SEQ ID NO: 868 - DNA, 211 bp, unidentified
  misc_feature 1..211: note = May be homo sapiens or mus musculus
  source 1..211: mol_type = genomic DNA
caggataactttgtaaacctgctgagctaccatgaatcattatgttctatttgctgtactaactgccattctttcagattcaactaaaagttcattttgttaacttttcagtgatccatctttttatacttcccttcttcgtggttttatgtttccagcctttctgtgattatttttcctctctttctgcctctcttcttgctttctgaag

SEQ ID NO: 869 - DNA, 209 bp, unidentified
  misc_feature 1..209: note = May be homo sapiens or mus musculus
  source 1..209: mol_type = genomic DNA
cccatctcctgcagatgagggtggcatctggagtcagggaggcttgatctggggcctgggtgtctgtcgctcgctgggtgccagttcctgcctgatgattctaaatctgggtgagtgcttgttgcttacaaaaagctgtagaacagaaaccatcacaacttgctgcttaccctcctgttctctccttttttttctttcttcttccccag

SEQ ID NO: 870 - DNA, 220 bp, unidentified
  misc_feature 1..220: note = May be homo sapiens or mus musculus
  source 1..220: mol_type = genomic DNA
atctaacaacttaaataaattccctctgtcaaaaaaccagttactttcttaattagaagacatttcacatgacttgattaaaaagtgagttttgttctcttattaaattaatttacactttctggggattaatgaagggagaagaaacaattataaaatgagtaaagtttagaatgtcttcagtaaacactgttaagtaatttttacattttgtctacag

SEQ ID NO: 871 - DNA, 196 bp, unidentified
  misc_feature 1..196: note = May be homo sapiens or mus musculus
  source 1..196: mol_type = genomic DNA
tattgtgttgtcttatctgtcctatgaattgtcatttgactcttccttttactttttatttcccctaactttcatgttatttccatctttaacacatatcatggacttacccctcccttcatctttagttcaaggaacatggtgaaacaagtatcttctgacagtgctttaccttattttctgggcctctgtgcag

SEQ ID NO: 872 - DNA, 203 bp, unidentified
  misc_feature 1..203: note = May be homo sapiens or mus musculus
  source 1..203: mol_type = genomic DNA
tctctgctcgctctgctcgcagtcacagacacttgagcacacgcgtacacccagacatcttcgggctgctattggattgactttgaaggttctgtgtgggtcgccgtggctgcatgtttgaatcaggtggagaagcacttcaacgctggacgaagtaaagattattgttgttattttttttttctctctctctctctcttaag

SEQ ID NO: 873 - DNA, 208 bp, unidentified
  misc_feature 1..208: note = May be homo sapiens or mus musculus
  source 1..208: mol_type = genomic DNA
cttcctttggaaggtggaacttggaaaacagccttactgtgataatgtgcttttcttccttttttgcccttcagcattcatcatcatatgactggctaacattattaataccttcttatcattttacaacaagcttctggaagaaagtgcatggtgtcagcttgcttgaaaataacattgctttgcttgttctactactctacattag

SEQ ID NO: 874 - DNA, 215 bp, unidentified
  misc_feature 1..215: note = May be homo sapiens or mus musculus
  source 1..215: mol_type = genomic DNA
tgaaggcaatgtttcctttacgtactctgacatttccccagttatcctattgttttaattttcttttataaatgttcctaactttttttctttttaaaaaatagtatctctcccatctgtgttgtctcttcctctctttggctggctgtgattatttctgtaaatgacattggctgtgctctaatggctccatttgcaatctgtttcctttgaag

SEQ ID NO: 875 - DNA, 150 bp, unidentified
  misc_feature 1..150: note = May be homo sapiens or mus musculus
  source 1..150: mol_type = genomic DNA
ccagtgcagttagggcctcatgtccccagccaatgactgaatgtccatcagcaatctagttctttgcccttttctcctatcccgtcttcattcctttgtcctccttcccttctcttttcccttcccctcttcctcccctgtgccatgcag

SEQ ID NO: 876 - DNA, 245 bp, unidentified
  misc_feature 1..245: note = May be homo sapiens or mus musculus
  source 1..245: mol_type = genomic DNA
acctggtttcaattcttccagctctattttcctgcacagctcaggcagcaaactgaagagctctgtgctaccattgataaggtcttacaggattccttgtctatggtaatgctttagactagaatgtgcaattcaaacatttgctttgcttctcttcattttcctctactttagtatgatgcctcacaggcttgtccttttctttccttttctcttcttctttccttcctttctttttttttcag

SEQ ID NO: 877 - DNA, 189 bp, unidentified
  misc_feature 1..189: note = May be homo sapiens or mus musculus
  source 1..189: mol_type = genomic DNA
tcttccaaatacatttttcttattgagccaatcccttgagtgcttcttttcctgatgcaacttttcttctaaaatgtgtgctaaaggccagatgtgagcaccctttgcatattcaactactgtactttgtttcttcttctgctaacagtattctttaatgtgattggtatcctgtgtcattttttctag

SEQ ID NO: 878 - DNA, 212 bp, unidentified
  misc_feature 1..212: note = May be homo sapiens or mus musculus
  source 1..212: mol_type = genomic DNA
aatcttactccatgggctatagctaaatgtttttgaatgtttattttacctttgttagcactgagttttttctctaacaaatttatgagtaagaactaagtaaactgttcttaatctatagcatgatgttgttgggttctatgctgtgttaaaaaatgtatatattatagatagattctgcttcaataagcaattttaagttacttttccag

SEQ ID NO: 879 - DNA, 176 bp, unidentified
  misc_feature 1..176: note = May be homo sapiens or mus musculus
  source 1..176: mol_type = genomic DNA
ggaggaacccgctgtgctctccaccatccccagctccatctccccagaggctgccctgcaggaggatgaacacccaaattatcacccagcatttcaggttcctgggccattctctgagtcagcccctaggcctgtgaggctgccacaccctgtgcccccgtgccttgcctccccag

SEQ ID NO: 880 - DNA, 237 bp, unidentified
  misc_feature 1..237: note = May be homo sapiens or mus musculus
  source 1..237: mol_type = genomic DNA
atgagaagcccccactggggttttctaaggagaaaggaggcaaatgcttttccgtgtcaatcagtccaatcttgttttcactctcttgagcaaaggattctggaaccatctgtcacctaaactttaactctaatcttcttctgcttcctttgtctcttttcttcccttacctcgcccacccctcgtctgtgtccgcccacccctcccttcccctcgtctctaacccggtgctaacag

SEQ ID NO: 881 - DNA, 221 bp, unidentified
  misc_feature 1..221: note = May be homo sapiens or mus musculus
  source 1..221: mol_type = genomic DNA
agggctctgctgccacctgcgtcctcagcggtgcttagcaggctatgcagctgtggccctgagagggccagcccagagaggcaagctgacccagcaagagaccttctcactgctgcagcaggacagcccccctctgaggcttgtgagggccaaggcctgggtcagggactcccacacatctcaaagctggacctcactctctcattgcctgccttttccag

SEQ ID NO: 882 - DNA, 193 bp, unidentified
  misc_feature 1..193: note = May be homo sapiens or mus musculus
  source 1..193: mol_type = genomic DNA
gggtttctgtttctttctaccactacacttgctactgaaaccaagcagatgacttcatttctcttggattccactttctcacgtgtcagaatgggagaggaagggaggtgttgggataagtttcagttccactgtttgtacttctcgtctggctaacacccatgtggcaaataggtttcatcatttgtttcag

SEQ ID NO: 883 - DNA, 197 bp, unidentified
  misc_feature 1..197: note = May be homo sapiens or mus musculus
  source 1..197: mol_type = genomic DNA
cagtttgtattcattgaagatatttttacattcttattttattgactcatgaactccatacctaccaaatattttgaattctatcatttagacctttttgcaatcaaggaaatatctgacgaaaattgattataggatagaacccgtacctatgttgacatgtactatgatgaattaccatttttctgttgcttcag

SEQ ID NO: 884 - DNA, 220 bp, unidentified
  misc_feature 1..220: note = May be homo sapiens or mus musculus
  source 1..220: mol_type = genomic DNA
attacaggtgtgagtcactgtgcccagccatgtgtttagacttttaactaatctcttttttagtttcaagccttatcgtccgcctctgtagaccactcctgtgcctgtttcctgatccttccaagggccattgtattccctgtctgctgcccctcttttggattcttctgcacatttttttgttcatgcattcattcatttattgtttgattaatgacag

SEQ ID NO: 885 - DNA, 248 bp, unidentified
  misc_feature 1..248: note = May be homo sapiens or mus musculus
  source 1..248: mol_type = genomic DNA
atagatgtgaattaatgtaaaaccataaacttttaagaaatggaagaaactactgacaaaataaatttgcaatttaatgttgtatcatgattccaaggatatctcttatgagctggtaaagataatagcctgtttctctcattgcatttcactttgatttttttttctcttttccatgtaaacataaatttctcttctcatatttctgtcttcatctccttgtttcttggtgtttcttctccctgaag

SEQ ID NO: 886 - DNA, 209 bp, unidentified
  misc_feature 1..209: note = May be homo sapiens or mus musculus
  source 1..209: mol_type = genomic DNA
ctaacttatttaaataaagtcaaaacatgggatcctctttcttttttaatagaagaaatttttgctcaaactgaagataaatgccattgtgagttacagtaatgaatccccaaaaattcctcagcaggcctttaatctgatttcattataagctgttaaatttaagttgtaaaacagtttcttaacagttgcctgtttttatctgacag

SEQ ID NO: 887 - DNA, 242 bp, unidentified
  misc_feature 1..242: note = May be homo sapiens or mus musculus
  source 1..242: mol_type = genomic DNA
gacatttactgcctatcagaaacggcaaatgatgtggagttgaaattattctaacaaaaatataacttttctaatatctgttgctgtttttctgttgaaaatgagcaggtagaatatacattgataggaaatgtgaaaatttttgcttgtgatcccttagtccgaagatagttctgccaggtaagttttcttaaaaatgtttttttctgtcctggcgcggtggctcacgcctgcaatcccag

SEQ ID NO: 888 - DNA, 178 bp, unidentified
  misc_feature 1..178: note = May be homo sapiens or mus musculus
  source 1..178: mol_type = genomic DNA
aatacttttccccaccacctattttaagctagatttttggagggatatggtggggggtggtgatgtagttggatttatttaaacacacacatatataatgacaaaggaaataatagtatggctttttttctgtaaagtcaagcacttaccagtttttctctgctccttaattttatag

SEQ ID NO: 889 - DNA, 147 bp, unidentified
  misc_feature 1..147: note = May be homo sapiens or mus musculus
  source 1..147: mol_type = genomic DNA
ctgtttgagatggagaacgtttttactgtgtcatcagatcctcatccctctcctgcagcccctccttcactttctttacccttatcttcatcttctacctcatctgggactaaaaaacaaaagaggaccccaacttatcagagatct

SEQ ID NO: 890 - DNA, 186 bp, unidentified
  misc_feature 1..186: note = May be homo sapiens or mus musculus
  source 1..186: mol_type = genomic DNA
gctttcattttcactccatacccaagctggctagccttcctcaggcaccattgccctcagctccatccagcttcctgcctttcagccccactggccctctcctccttggctgctgtgagacaccagtggtctccttggctgaggctcagcaggagctacagatgctgcagaagcagttgggagaaa

SEQ ID NO: 891 - DNA, 48 bp, unidentified
  misc_feature 1..48: note = May be homo sapiens or mus musculus
  source 1..48: mol_type = genomic DNA
gattataaatcattacattggagtgtgcttctctgtgcggatgaaatg

SEQ ID NO: 892 - DNA, 79 bp, unidentified
  misc_feature 1..79: note = May be homo sapiens or mus musculus
  source 1..79: mol_type = genomic DNA
atgagctctatgcccagaaactgaagtacaaggccattagcgaggagctggaccacgccctcaatgacatgacctctat

SEQ ID NO: 893 - DNA, 171 bp, unidentified
  misc_feature 1..171: note = May be homo sapiens or mus musculus
  source 1..171: mol_type = genomic DNA
aatttttaaggggccctgagatagctttgcttcgtaagcgcctgcaacaactgaggcttaagaaggctgagcagcagaggcagcaagagctagctgcacatacccagcaacagccttccacttctgatcagtcttctcatgagggctcttcacaggaccctcatgcttcag

SEQ ID NO: 894 - DNA, 123 bp, unidentified
  misc_feature 1..123: note = May be homo sapiens or mus musculus
  source 1..123: mol_type = genomic DNA
gtcccctgaagtcatgggttgctggctcctgctcagagtgacagcaccctgtggagtctgctggtactgacctaaccaccacagagccccactggagcatggagccagcctagagagggtcag

SEQ ID NO: 895 - DNA, 33 bp, unidentified
  misc_feature 1..33: note = May be homo sapiens or mus musculus
  source 1..33: mol_type = genomic DNA
ttctgaaactgagtccctaaccaagctggaccg

SEQ ID NO: 896 - DNA, 113 bp, unidentified
  misc_feature 1..113: note = May be homo sapiens or mus musculus
  source 1..113: mol_type = genomic DNA
atctattgatgctatccctgacaaccaaaagtttaagcagttgcagagggagctctctcaagtgctgacccagcgccagatctacatccagcctgataattaagccgatccag

SEQ ID NO: 897 - DNA, 57 bp, unidentified
  misc_feature 1..57: note = May be homo sapiens or mus musculus
  source 1..57: mol_type = genomic DNA
gtggaaaaaacccacatcgaggtgacagtacccacctcaaatggtgaccaaacacag

SEQ ID NO: 898 - DNA, 101 bp, unidentified
  misc_feature 1..101: note = May be homo sapiens or mus musculus
  source 1..101: mol_type = genomic DNA
tttcagaaacaactctccaagttccatttccaaggaaagtcttaaccatttgtcccttctggcgtaccctctttcattgaaatccatgcagaatataccag

SEQ ID NO: 899 - DNA, 39 bp, unidentified
  misc_feature 1..39: note = May be homo sapiens or mus musculus
  source 1..39: mol_type = genomic DNA
gaccagagtaatgcggagaagcacgcagatggaatgata

SEQ ID NO: 900 - DNA, 141 bp, unidentified
  misc_feature 1..141: note = May be homo sapiens or mus musculus
  source 1..141: mol_type = genomic DNA
acagctcccgagggctcctttgcctctgctgacgccctcctcagcaggctagctcaccccgtctctctctgtggtgcacttgactatctggagcccgacttagcagaaaagaaccccccactattcgctcagaaactccag

SEQ ID NO: 901 - DNA, 27 bp, unidentified
  misc_feature 1..27: note = May be homo sapiens or mus musculus
  source 1..27: mol_type = genomic DNA
cctataaatgagaagccatctggagag

SEQ ID NO: 902 - DNA, 105 bp, unidentified
  misc_feature 1..105: note = May be homo sapiens or mus musculus
  source 1..105: mol_type = genomic DNA
agagaggatgcaagccatggagaaacagattgccagtttaactggccttgttcagtctgcgctttttaaagggcccattacaagttatagcaaagatgcgtctag

SEQ ID NO: 903 - DNA, 36 bp, unidentified
  misc_feature 1..36: note = May be homo sapiens or mus musculus
  source 1..36: mol_type = genomic DNA
ggcatttttggcagttggagaacaaagcaatccaag

SEQ ID NO: 904 - DNA, 96 bp, unidentified
  misc_feature 1..96: note = May be homo sapiens or mus musculus
  source 1..96: mol_type = genomic DNA
tgaacctatccccgcttcgtgttctgggggcacccaccctgtaatggcgagacttcctagccccactgtagctaggagcgctgtgcagcctgccag

SEQ ID NO: 905 - DNA, 30 bp, unidentified
  misc_feature 1..30: note = May be homo sapiens or mus musculus
  source 1..30: mol_type = genomic DNA
cctcacaggctgtggaccctggccgagcag

SEQ ID NO: 906 - DNA, 51 bp, unidentified
  misc_feature 1..51: note = May be homo sapiens or mus musculus
  source 1..51: mol_type = genomic DNA
gtcaaaagtccgggtgcggctcctacacggatgactgcctgctgttataag

SEQ ID NO: 907 - DNA, 66 bp, unidentified
  misc_feature 1..66: note = May be homo sapiens or mus musculus
  source 1..66: mol_type = genomic DNA
atcaatacagattctttttcttcctatcctgttttctctcctgtttctttggattatagcagtgaa

SEQ ID NO: 908 - DNA, 29 bp, unidentified
  misc_feature 1..29: note = May be homo sapiens or mus musculus
  source 1..29: mol_type = genomic DNA
tgcaacaaggatgaatagaatgggccaag

SEQ ID NO: 909 - DNA, 37 bp, unidentified
  misc_feature 1..37: note = May be homo sapiens or mus musculus
  source 1..37: mol_type = genomic DNA
ggattaatgaaaatcaagttccatcctcagacaagag

SEQ ID NO: 910 - DNA, 102 bp, unidentified
  misc_feature 1..102: note = May be homo sapiens or mus musculus
  source 1..102: mol_type = genomic DNA
actaatctagacaaagatctcagcctctgccagacagagttagaggcagatttagaaaaaatggagacgcttaataaagcacccagtgcaaacgtgccacag

SEQ ID NO: 911 - DNA, 66 bp, unidentified
  misc_feature 1..66: note = May be homo sapiens or mus musculus
  source 1..66: mol_type = genomic DNA
cctcccaaaaagatatgggattatactcctggagactgctctatccttcctagagaggatagaaag

SEQ ID NO: 912 - DNA, 75 bp, unidentified
  misc_feature 1..75: note = May be homo sapiens or mus musculus
  source 1..75: mol_type = genomic DNA
acactcctgaagaaaacccttatttccctacgtacaaattccctgaacttcctgaaatccagcaaacttccgaag

SEQ ID NO: 913 - DNA, 96 bp, unidentified
  misc_feature 1..96: note = May be homo sapiens or mus musculus
  source 1..96: mol_type = genomic DNA
caactgccgaccctttacgcgcacgctctatttctgctgttaaaatcattcctgtgaagacagtgaaaaacgcctcaggcctagttctccctacag

SEQ ID NO: 914 - DNA, 96 bp, unidentified
  misc_feature 1..96: note = May be homo sapiens or mus musculus
  source 1..96: mol_type = genomic DNA
gtgatgctgagccctgccatgcaaggggtcatcctggccatagctaaagcccgtcagacctttgaccgagatgggtctgaagcagggctgattaag

SEQ ID NO: 915 - DNA, 33 bp, unidentified
  misc_feature 1..33: note = May be homo sapiens or mus musculus
  source 1..33: mol_type = genomic DNA
acacaacggcgacgacagaaccagcagttcacg

SEQ ID NO: 916 - DNA, 126 bp, unidentified
  misc_feature 1..126: note = May be homo sapiens or mus musculus
  source 1..126: mol_type = genomic DNA
aataaactactctctaaaggcctgtctcatactcatcctccatctcctccctctcgccttccgtctcctgatccagctgcttcttcctctccatcaactgttgactctgcttctcctgccagaaag

SEQ ID NO: 917 - DNA, 42 bp, unidentified
  misc_feature 1..42: note = May be homo sapiens or mus musculus
  source 1..42: mol_type = genomic DNA
atagtttcaaacaaaagcatacctcgaaagcgccccagagag

SEQ ID NO: 918 - DNA, 71 bp, unidentified
  misc_feature 1..71: note = May be homo sapiens or mus musculus
  source 1..71: mol_type = genomic DNA
gcaatgtatcaggaacacagaggttggattctgctacagtcaggacttactcctgctaaagtctcctgttg

SEQ ID NO: 919 - DNA, 27 bp, unidentified
  misc_feature 1..27: note = May be homo sapiens or mus musculus
  source 1..27: mol_type = genomic DNA
agtttcagttcctgcattcagcttatg

SEQ ID NO: 920 - DNA, 33 bp, unidentified
  misc_feature 1..33: note = May be homo sapiens or mus musculus
  source 1..33: mol_type = genomic DNA
atcgtggccggagtgtcagtgcccccgtattag

SEQ ID NO: 921 - DNA, 43 bp, unidentified
  misc_feature 1..43: note = May be homo sapiens or mus musculus
  source 1..43: mol_type = genomic DNA
tcattgcacaataaggatttttgaatgtataatatcatctaag

SEQ ID NO: 922 - DNA, 105 bp, unidentified
  misc_feature 1..105: note = May be homo sapiens or mus musculus
  source 1..105: mol_type = genomic DNA
acgcagaccaaactggagcatgcccgcattaaggagcttgaacagagcctgctctttgaaaagaccaaagctgacaaactccagagggagttagaagacactagg

SEQ ID NO: 923 - DNA, 48 bp, unidentified
  misc_feature 1..48: note = May be homo sapiens or mus musculus
  source 1..48: mol_type = genomic DNA
aaagcaagacagatctcattggctgtcacaagtgcagttcctgtacag

SEQ ID NO: 924 - DNA, 39 bp, unidentified
  misc_feature 1..39: note = May be homo sapiens or mus musculus
  source 1..39: mol_type = genomic DNA
gtctgatgaaagtgactcctctctctcggaggtacacag

SEQ ID NO: 925 - DNA, 129 bp, unidentified
  misc_feature 1..129: note = May be homo sapiens or mus musculus
  source 1..129: mol_type = genomic DNA
ctcagattctggaacttcagaggctagtctttcacctccttcttccccaccaagccggccccgtaatgaactgaatgtttttaatcgtcttactgtttctcagggaaacacatcagttcagcaggataa

SEQ ID NO: 926 - DNA, 132 bp, unidentified
  misc_feature 1..132: note = May be homo sapiens or mus musculus
  source 1..132: mol_type = genomic DNA
gcacggccagggtggagctctgtgcacagggctcagcggacctggcacacctggacgacggtccctacgaggcggggggagagaaggagcaggacccccgcctcatcccggtccctgccaacagctactttg

SEQ ID NO: 927 - DNA, 62 bp, unidentified
  misc_feature 1..62: note = May be homo sapiens or mus musculus
  source 1..62: mol_type = genomic DNA
actatgaactgctgggagataagaccatctgatttatccgtgtacatacagcagctagcaca

SEQ ID NO: 928 - DNA, 87 bp, unidentified
  misc_feature 1..87: note = May be homo sapiens or mus musculus
  source 1..87: mol_type = genomic DNA
atggatgtagtgaatgctttccagagtggaagttccattcagggggctctaaggcggcaaccctccatcgccagccagcatcatgat

SEQ ID NO: 929 - DNA, 165 bp, unidentified
  misc_feature 1..165: note = May be homo sapiens or mus musculus
  source 1..165: mol_type = genomic DNA
caatctttcgtcagttcgacgcatgtacaaggagagtaattcttcctccagtcttccaagtcttcacacttccttctctgccccttccttcactgccccctctttcctgaaaagcttttaccagaattcaggtagactgtccccacagtatgaaaatgaaatcag

SEQ ID NO: 930 - DNA, 57 bp, unidentified
  misc_feature 1..57: note = May be homo sapiens or mus musculus
  source 1..57: mol_type = genomic DNA
catctgaatccatttctttgaaaaacttaaaaaggcgatcacaattttttgaacaag

SEQ ID NO: 931 - DNA, 42 bp, unidentified
  misc_feature 1..42: note = May be homo sapiens or mus musculus
  source 1..42: mol_type = genomic DNA
ggtcatcaggcttttcttacagttcatgggtctacctctgtg

SEQ ID NO: 932 - DNA, 141 bp, unidentified
  misc_feature 1..141: note = May be homo sapiens or mus musculus
  source 1..141: mol_type = genomic DNA
gttcccagtgcccccgacaagcccctgctggtgtctccatctcctgccaagcatcctccagtgcctcctcctgtgggcctggcctcagggctatggacagactcctgtcccatcccagagacccctcgtgatcgtgccctg

SEQ ID NO: 933 - DNA, 141 bp, unidentified
  misc_feature 1..141: note = May be homo sapiens or mus musculus
  source 1..141: mol_type = genomic DNA
ccatgagaagccgatccattggtgaatgtgctctgccatcggcctatatacgcagtgctaaaagtgctcctgttctgatccatacttccaaacccttcttgcctgatattgttctcactcccctttctgatgagctttcag

SEQ ID NO: 934 - DNA, 51 bp, unidentified
  misc_feature 1..51: note = May be homo sapiens or mus musculus
  source 1..51: mol_type = genomic DNA
gcaactctccagaagcatactttcatggttttccttcccttttttcagtta

SEQ ID NO: 935 - DNA, 151 bp, unidentified
  misc_feature 1..151: note = May be homo sapiens or mus musculus
  source 1..151: mol_type = genomic DNA
cctgaccaagaaggcgtcaccataccagatctggggagtctctcctcacctctgatagacacagagaggaatctgggcctgcttctcggattacacgcttcctatttagcaatgagcacaccgctgtctcctgtcgagattgaatgtgcca

SEQ ID NO: 936 - DNA, 87 bp, unidentified
  misc_feature 1..87: note = May be homo sapiens or mus musculus
  source 1..87: mol_type = genomic DNA
cattacctggccaggaatttctacaacctgaggttccttgctctgtttgtagccttcgctatcaacttcatcctgcttttttataag

SEQ ID NO: 937 - DNA, 168 bp, unidentified
  misc_feature 1..168: note = May be homo sapiens or mus musculus
  source 1..168: mol_type = genomic DNA
acatggaggtatcttcatcttctgttaccacaatggcaagtatcccagaaatcacacctaaagtgattgatacctggagacctaaactgacaagctctcggaaatttgtagttcaagatgatccaaacacttctgattttactgatcctttatcgggtatcccaaagg

SEQ ID NO: 938 - DNA, 39 bp, unidentified
  misc_feature 1..39: note = May be homo sapiens or mus musculus
  source 1..39: mol_type = genomic DNA
cgagccatgtcctccaaccgatgagcaattggttgcagg

SEQ ID NO: 939 - DNA, 107 bp, unidentified
  misc_feature 1..107: note = May be homo sapiens or mus musculus
  source 1..107: mol_type = genomic DNA
aacgtattttcagcagcattttgaagcacccctggcgtgcactgcacagggaaaccaggaccacattggtgtgctgtgtcctccttaccaactggctcttggagaag

SEQ ID NO: 940 - DNA, 98 bp, unidentified
  misc_feature 1..98: note = May be homo sapiens or mus musculus
  source 1..98: mol_type = genomic DNA
ggctggagactctgaaagacacaccgcccccacggctcatcaagtcacacctgcccctggctctgctccctcagactctgttggatcagaaggtcaag

SEQ ID NO: 941 - DNA, 39 bp, unidentified
  misc_feature 1..39: note = May be homo sapiens or mus musculus
  source 1..39: mol_type = genomic DNA
ttgcgtacttgaaggaccgaaggctgagtggaggagcag

SEQ ID NO: 942 - DNA, 87 bp, unidentified
  misc_feature 1..87: note = May be homo sapiens or mus musculus
  source 1..87: mol_type = genomic DNA
acttttctgtcctcggcccagaagagaggtagaggtggggagtctgacctggagcccatagacagctggcttataacccaaggaatg

SEQ ID NO: 943 - DNA, 38 bp, unidentified
  misc_feature 1..38: note = May be homo sapiens or mus musculus
  source 1..38: mol_type = genomic DNA
tacgatgccaactgttaagcctgcaggaatcctcctgg

SEQ ID NO: 944 - DNA, 69 bp, unidentified
  misc_feature 1..69: note = May be homo sapiens or mus musculus
  source 1..69: mol_type = genomic DNA
gtcacgagcatgatttccgagttaagcacctgtccgaggccttgaacgacaagcacgggccgctggccg

SEQ ID NO: 945 - DNA, 153 bp, unidentified
  misc_feature 1..153: note = May be homo sapiens or mus musculus
  source 1..153: mol_type = genomic DNA
ggcttcttccctgtaccccaaggggcggcctgcctggcccctggataaacgctgcttgtgtttgtgcggccgacatctcgccaggtcacgagcatgatttccgagttaagcacctgtccgaggccttgaacgacaagcacgggccgctggccg

SEQ ID NO: 946 - DNA, 49 bp, unidentified
  misc_feature 1..49: note = May be homo sapiens or mus musculus
  source 1..49: mol_type = genomic DNA
gtcagcttgcaaggttgaatgcaatatccttttatcacactcctctcaa

SEQ ID NO: 947 - DNA, 123 bp, unidentified
  misc_feature 1..123: note = May be homo sapiens or mus musculus
  source 1..123: mol_type = genomic DNA
actaagcagtcttctggggaaaagctcatggatggctctgaaatcttcagtttattagagtctgcgcgaaaaccaacagaattcataggaggggttacttctacttctcaaagctgggttcag

SEQ ID NO: 948 - DNA, 120 bp, unidentified
  misc_feature 1..120: note = May be homo sapiens or mus musculus
  source 1..120: mol_type = genomic DNA
cttgcagaagatggtgcgtccggatcagccacaaacagtaacaaccatctaatcgagcctcagatccgccggcctcgtagcctcagctcgccaacagtaactttatctgccccgctggag

SEQ ID NO: 949 - DNA, 80 bp, unidentified
  misc_feature 1..80: note = May be homo sapiens or mus musculus
  source 1..80: mol_type = genomic DNA
ggttaccctcgatccctctaaacggcagaactctaaccgctgtgtttcgggcgcctctctgccccagggatccaagatca

SEQ ID NO: 950 - DNA, 27 bp, unidentified
  misc_feature 1..27: note = May be homo sapiens or mus musculus
  source 1..27: mol_type = genomic DNA
gagaccaaggagatcagctgggagcag

SEQ ID NO: 951 - DNA, 108 bp, unidentified
  misc_feature 1..108: note = May be homo sapiens or mus musculus
  source 1..108: mol_type = genomic DNA
cacggagcagccgtatccctcgacccagcatgagtcaggggtgcagccgcgataccagccgtgagagcagccgagatacaagccctgctcggggctttcctccacttg

SEQ ID NO: 952 - DNA, 45 bp, unidentified; identical to SEQ ID NO: 37
  misc_feature 1..45: note = May be homo sapiens or mus musculus
  source 1..45: mol_type = genomic DNA

SEQ ID NO: 953 - DNA, 60 bp, unidentified
  misc_feature 1..60: note = May be homo sapiens or mus musculus
  source 1..60: mol_type = genomic DNA
gacgctgcattgggatacagatccatcagttcttcagcttcactcagattccgatttggg

SEQ ID NO: 954 - DNA, 129 bp, unidentified
  misc_feature 1..129: note = May be homo sapiens or mus musculus
  source 1..129: mol_type = genomic DNA
attttcacatttcacacgaaactcgtattcaagaccttcaataaggtttttcactgaaaagacagtttctcgaatttcttctgttgtcacagaaatccatttattctgcttcttctcacgcttctcaag

SEQ ID NO: 955 - DNA, 72 bp, unidentified
  misc_feature 1..72: note = May be homo sapiens or mus musculus
  source 1..72: mol_type = genomic DNA
gaactcaatgagttaaaggaccagattcaggatgtagaaggcaaatacatgcagggattgaaagagatgaag

SEQ ID NO: 956 - DNA, 27 bp, unidentified
  misc_feature 1..27: note = May be homo sapiens or mus musculus
  source 1..27: mol_type = genomic DNA
ccaacactgtgcctggaggacccaaat

SEQ ID NO: 957 - DNA, 135 bp, unidentified
  misc_feature 1..135: note = May be homo sapiens or mus musculus
  source 1..135: mol_type = genomic DNA
cttcctggtggccgacttcaggcggcggggcgtggacgtgtctcaggtggcctggcagagcaagggggacacccccagctcctgctgcatcatcaacaactccaatggcaaccgtaccattgtgctccatgacac

SEQ ID NO: 958 - DNA, 107 bp, unidentified
  misc_feature 1..107: note = May be homo sapiens or mus musculus
  source 1..107: mol_type = genomic DNA
caaaacaatatcagtcaaggtaattgatgatgaggagtatgagaaaaacaagaccttcttccttgagattggagagccccgcctggtggagatgagtgagaagaaag

SEQ ID NO: 959 - DNA, 54 bp, unidentified
  misc_feature 1..54: note = May be homo sapiens or mus musculus
  source 1..54: mol_type = genomic DNA
ctaggactcagattggatcaaaattcacacggtggggatcacagggagaaagag

SEQ ID NO: 960 - DNA, 93 bp, unidentified
  misc_feature 1..93: note = May be homo sapiens or mus musculus
  source 1..93: mol_type = genomic DNA
aagcatcctcatcttctataagggagcgaccacctgaagaagttgcagctcgccttgcacaacaggaaaaacaagaacaagttaaaattgagt

SEQ ID NO: 961 - DNA, 57 bp, unidentified
  misc_feature 1..57: note = May be homo sapiens or mus musculus
  source 1..57: mol_type = genomic DNA
gaagttatcaaggaggatgctgctgaggggctttcttcacccacagactcctcgagg

SEQ ID NO: 962 - DNA, 78 bp, unidentified
  misc_feature 1..78: note = May be homo sapiens or mus musculus
  source 1..78: mol_type = genomic DNA
cacagtttgctgcttttctgaaacaaaatatgctggtgaggaaagctcttcctcctggcacctcctcctgtctctttg

SEQ ID NO: 963 - DNA, 189 bp, unidentified
  misc_feature 1..189: note = May be homo sapiens or mus musculus
  source 1..189: mol_type = genomic DNA
caaagatcacctgtctattctggatttgtgtttccttccgctctttctcctcatcctatcactcaacatacatcagccccatggcctgaattcatggctacatctgtcgatcctttacctttaaatgacacacctcctcctttaccagctaagaaacacagaaggcagcagcagcagcaggagcaacag

SEQ ID NO: 964 - DNA, 36 bp, unidentified
  misc_feature 1..36: note = May be homo sapiens or mus musculus
  source 1..36: mol_type = genomic DNA
gagcaattagtaattccaaaagttcaagtatcaaag

SEQ ID NO: 965 - DNA, 150 bp, unidentified
  misc_feature 1..150: note = May be homo sapiens or mus musculus
  source 1..150: mol_type = genomic DNA
agctccccacgatgagatggtgctgtgctggctctgcagtttctctctcttcagtcccattttccggaagtgtgatatgcgtctttatctggtttttccatgcctttttctcaaatagtatctactctctccttttctcttccttctcag

SEQ ID NO: 966 - DNA, 81 bp, unidentified
  misc_feature 1..81: note = May be homo sapiens or mus musculus
  source 1..81: mol_type = genomic DNA
atgatagtgaaaaaaaaccccagcgacgcaatcgtagccgcaggcgtcgcttcaggggtcaggcagaagatagacagccag

SEQ ID NO: 967 - DNA, 102 bp, unidentified
  misc_feature 1..102: note = May be homo sapiens or mus musculus
  source 1..102: mol_type = genomic DNA
gccctagagaaacagaaagaatacattgcctgccttaggaatgagcgagatatgctcagagaggagctggctgacctgcaggagacagtgaagacgggagag

SEQ ID NO: 968 - DNA, 93 bp, unidentified
  misc_feature 1..93: note = May be homo sapiens or mus musculus
  source 1..93: mol_type = genomic DNA
gagaagcagcgcatgcagcagaaaatagacaccatgacaaaagaggtgtttgacctccaggagacacttctttggaaagataaaaaaattggg

SEQ ID NO: 969 - DNA, 51 bp, unidentified
  misc_feature 1..51: note = May be homo sapiens or mus musculus
  source 1..51: mol_type = genomic DNA
tactctcttcattcctttgatcggaagtggggacagattcagaagtggctg

SEQ ID NO: 970 - DNA, 117 bp, unidentified
  misc_feature 1..117: note = May be homo sapiens or mus musculus
  source 1..117: mol_type = genomic DNA
ttttgaatatactaacactgaatcagcacttctaaagcccttccttctcccactggcttcacttggctttcagacataatgaggagactggcttttcgaggcgctggttgtgctctg

SEQ ID NO: 971 - DNA, 69 bp, unidentified
  misc_feature 1..69: note = May be homo sapiens or mus musculus
  source 1..69: mol_type = genomic DNA
ggaaaaagagagaaatgtatgagcatcctgtcttctgcttggcctcccaagtgatggatttaaccattc

SEQ ID NO: 972 - DNA, 30 bp, unidentified
  misc_feature 1..30: note = May be homo sapiens or mus musculus
  source 1..30: mol_type = genomic DNA
ctactgttgaggctattgaggctgatgaag

SEQ ID NO: 973 - DNA, 99 bp, unidentified
  misc_feature 1..99: note = May be homo sapiens or mus musculus
  source 1..99: mol_type = genomic DNA
taaacttcacctgccaacggctcctcccccacttaatgagggagaaagtttggtcagccgcattcttcagctggggcctcctggaaccaaattccttgg

SEQ ID NO: 974 - DNA, 92 bp, unidentified
  misc_feature 1..92: note = May be homo sapiens or mus musculus
  source 1..92: mol_type = genomic DNA
gctttgagttacacaggtagccacatgaaagtccacttacccagtttagtagagaatgaaatcctgaaagaggatggatcaataattaaaag

SEQ ID NO: 975 - DNA, 42 bp, unidentified
  misc_feature 1..42: note = May be homo sapiens or mus musculus
  source 1..42: mol_type = genomic DNA
gagccccaaactactgtaatccacaaccctgatggaaacaag

SEQ ID NO: 976 - DNA, 151 bp, unidentified
  misc_feature 1..151: note = May be homo sapiens or mus musculus
  source 1..151: mol_type = genomic DNA
tcctggatcagtgagagtgtggaggccgacgtgcgcctccgcctggccaatgtgtcggagcgggacgggggcgagtacctctgtcgagccaccaatttcataggcgtggccgagaaggccttttggctgagcgttcacgggccccgagcag

SEQ ID NO: 977 - DNA, 188 bp, unidentified
  misc_feature 1..188: note = May be homo sapiens or mus musculus
  source 1..188: mol_type = genomic DNA
gaattcaaacccattggtaccgcgcacaacagaagggcccagccttttgttgcagctgcaaacattgatgacaaaagacaggtagtgagcgcttcctataactcgccaattgggctctattcaactagcaatatacaagatgcgcttcacggacagctgcggggtctcattcctagctcacctcaaaa

SEQ ID NO: 978 - DNA, 45 bp, unidentified
  misc_feature 1..45: note = May be homo sapiens or mus musculus
  source 1..45: mol_type = genomic DNA
ccatgtccctgaacctgaggattatggctgctctcctgatgaatg

SEQ ID NO: 979 - DNA, 54 bp, unidentified
  misc_feature 1..54: note = May be homo sapiens or mus musculus
  source 1..54: mol_type = genomic DNA
acactggcgtaaaagataacatctataggaaaccccctatctacagacagcatg

SEQ ID NO: 980 - DNA, 39 bp, unidentified
  misc_feature 1..39: note = May be homo sapiens or mus musculus
  source 1..39: mol_type = genomic DNA
aaaaccagtctatccaagaccaggcacctatgttggaag

SEQ ID NO: 981 - DNA, 60 bp, unidentified
  misc_feature 1..60: note = May be homo sapiens or mus musculus
  source 1..60: mol_type = genomic DNA
aacacctacacctctataggtgctggtccgtttcctctgtggaatttctaggctccagtg

SEQ ID NO: 982 - DNA, 45 bp, unidentified
  misc_feature 1..45: note = May be homo sapiens or mus musculus
  source 1..45: mol_type = genomic DNA
aaaggaaaatatcccaaggactaatctgatcgggtcttccttcat

SEQ ID NO: 983 - DNA, 132 bp, unidentified
  misc_feature 1..132: note = May be homo sapiens or mus musculus
  source 1..132: mol_type = genomic DNA
gggagaatttcgatcgccaggccagccttcggcggtctctaatttacacagacactctggtaagacgaccgaagaaagtcaaaaggagaaagactattacaggagtccctgacaacatacagaaggagctag

SEQ ID NO: 984 - DNA, 100 bp, unidentified
  misc_feature 1..100: note = May be homo sapiens or mus musculus
  source 1..100: mol_type = genomic DNA
cggtgttgggcctgcttgccgcgggagtgacgctacttcttccagagaccaagggggtcgctttgccagagaccatgaaggacgccgagaaccttgggag

SEQ ID NO: 985 - DNA, 151 bp, unidentified
  misc_feature 1..151: note = May be homo sapiens or mus musculus
  source 1..151: mol_type = genomic DNA
gagggtcccccccagctgaccagaccctggtcatcaagacattccgcttcctgtcacagaaactctttatctccgtctcagttctctccagcctgggcattgtcctagctgttgtctgtctgtcctttaacatctacaactcacatgtccg

SEQ ID NO: 986 - DNA, 60 bp, unidentified
  misc_feature 1..60: note = May be homo sapiens or mus musculus
  source 1..60: mol_type = genomic DNA
cattcttctgattctccttcaaggtccccaaagacattgttgggttctgacacagtcaaa

SEQ ID NO: 987 - DNA, 72 bp, unidentified
  misc_feature 1..72: note = May be homo sapiens or mus musculus
  source 1..72: mol_type = genomic DNA
ttcatcatcatgggagtaaaatgttacgttcggaatcaaactcttcaattactactactcagcctactatag

SEQ ID NO: 988 - DNA, 27 bp, unidentified
  misc_feature 1..27: note = May be homo sapiens or mus musculus
  source 1..27: mol_type = genomic DNA
cttggattcctatccggtaacttctaa

SEQ ID NO: 989 - DNA, 99 bp, unidentified
  misc_feature 1..99: note = May be homo sapiens or mus musculus
  source 1..99: mol_type = genomic DNA
gcgtgtgaccccctgccgcacgaggaggagccctctgaagtgccacagctgcgccagccctacgctcctccccggcccggcgcccgccccacacactgg

SEQ ID NO: 990 - DNA, 75 bp, unidentified; identical to SEQ ID NO: 23
  misc_feature 1..75: note = May be homo sapiens or mus musculus
  source 1..75: mol_type = genomic DNA

SEQ ID NO: 991 - DNA, 45 bp, unidentified
  misc_feature 1..45: note = May be homo sapiens or mus musculus
  source 1..45: mol_type = genomic DNA
ttcgtctgagcaaaactcagtccgagccttccctgagctgtcaag

SEQ ID NO: 992 - DNA, 112 bp, unidentified
  misc_feature 1..112: note = May be homo sapiens or mus musculus
  source 1..112: mol_type = genomic DNA
cttagatttgttgacagcggtttcctggagtgctgtcttgagaacgattctgaggaggctcagcaagaaagagtgtttcagttgattgggtgtgtctgtcatggagaaggaa

SEQ ID NO: 993 - DNA, 57 bp, unidentified
  misc_feature 1..57: note = May be homo sapiens or mus musculus
  source 1..57: mol_type = genomic DNA
cctattggtgtaggtataccaacaattaatttaagaaaaaggagacccaatatccag

SEQ ID NO: 994 - DNA, 108 bp, unidentified
  misc_feature 1..108: note = May be homo sapiens or mus musculus
  source 1..108: mol_type = genomic DNA
ggtcttgctttgtctcccaggctggtgtgcagtggtgcgaccacggctcacggcagcctcagccacccagatgtaagcgatctggttcccacctcagcctcccgagta

SEQ ID NO: 995 - DNA, 27 bp, unidentified
  misc_feature 1..27: note = May be homo sapiens or mus musculus
  source 1..27: mol_type = genomic DNA
atcactacattccaagctatcagaaag

SEQ ID NO: 996 - DNA, 33 bp, unidentified
  misc_feature 1..33: note = May be homo sapiens or mus musculus
  source 1..33: mol_type = genomic DNA
tgtccatgttacttcactgaagaaacatacaag

SEQ ID NO: 997 - DNA, 67 bp, unidentified
  misc_feature 1..67: note = May be homo sapiens or mus musculus
  source 1..67: mol_type = genomic DNA
cactttgggaggccgaggcgggcagatcacttgaggccaggagttccagaccagcctggccaacatg

SEQ ID NO: 998 - DNA, 95 bp, unidentified
  misc_feature 1..95: note = May be homo sapiens or mus musculus
  source 1..95: mol_type = genomic DNA
agccagaatgaagaatggggaggtttgtctgaggatatcttatgataaagagcagtctaaggctttagtccctttgatccccaacttatttattg

SEQ ID NO: 999-1108 - skipped (110 entries)

SEQ ID NO: 1109 - DNA, 147 bp, synthetic construct
  misc_feature 1..147: note = Synthetic
  source 1..147: mol_type = other DNA
ctgtttgagattgagaacgtttttactgtgtcatcagatcctcatccctctcctgcagcccctccttcactttctttacccttatcttcatcttctacctcatctgggactaaaaaacaaaagaggaccccaacttatcagagaatg

SEQ ID NO: 1110 - DNA, 186 bp, synthetic construct
  misc_feature 1..186: note = Synthetic
  source 1..186: mol_type = other DNA
gctttcattttcactccatacccaagctggctagccttcctcaggcaccattgccctcagctccatccagcttcctgcctttcagccccactggccctctcctccttggctgctgtgagacaccagtggtctccttggctgaggctcagcaggagctacagattctgcagaagcagttgggagatg

SEQ ID NO: 1111 - DNA, 48 bp, synthetic construct
  misc_feature 1..48: note = Synthetic
  source 1..48: mol_type = other DNA
gattataaatcattacattggagtgtgcttctctgtgcggattaaatg

SEQ ID NO: 1112 - DNA, 79 bp, synthetic construct
  misc_feature 1..79: note = Synthetic
  source 1..79: mol_type = other DNA
attagctctattcccagaaactgaagtacaaggccattagcgaggagctggaccacgccctcaattacattacctcatg

SEQ ID NO: 1113 - DNA, 171 bp, synthetic construct
  misc_feature 1..171: note = Synthetic
  source 1..171: mol_type = other DNA
aatttttaaggggccctgagatagctttgcttcgtaagcgcctgcaacaactgaggcttaagaaggctgagcagcagaggcagcaagagctagctgcacatacccagcaacagccttccacttctgatcagtcttctcattagggctcttcacaggaccctcattcttatg

SEQ ID NO: 1114 - DNA, 123 bp, synthetic construct
  misc_feature 1..123: note = Synthetic
  source 1..123: mol_type = other DNA
gtcccctgaagtcattggttgctggctcctgctcagagtgacagcaccctgtggagtctgctggtactgacctaaccaccacagagccccactggagcattgagccagcctagagagggtatg

SEQ ID NO: 1115 - DNA, 33 bp, synthetic construct
  misc_feature 1..33: note = Synthetic
  source 1..33: mol_type = other DNA
ttctgaaactgagtccctaaccaagctggaatg

SEQ ID NO: 1116 - DNA, 113 bp, synthetic construct
  misc_feature 1..113: note = Synthetic
  source 1..113: mol_type = other DNA
atctattgattctatccctgacaaccaaaagtttaagcagttgcagagggagctctctcaagtgctgacccagcgccagatctacatccagcctgataattaagccgatcatg

SEQ ID NO: 1117 - DNA, 57 bp, synthetic construct
  misc_feature 1..57: note = Synthetic
  source 1..57: mol_type = other DNA
gtggaaaaaacccacatcgaggtgacagtacccacctcaaattgtgaccaaacaatg

SEQ ID NO: 1118 - DNA, 101 bp, synthetic construct
  misc_feature 1..101: note = Synthetic
  source 1..101: mol_type = other DNA
tttcagaaacaactctccaagttccatttccaaggaaagtcttaaccatttgtcccttctggcgtaccctctttcattgaaatccattcagaatatacatg

SEQ ID NO: 1119 - DNA, 39 bp, synthetic construct
  misc_feature 1..39: note = Synthetic
  source 1..39: mol_type = other DNA
gaccagagtaattcggagaagcacgcagattgaattatg

SEQ ID NO: 1120 - DNA, 141 bp, synthetic construct
  misc_feature 1..141: note = Synthetic
  source 1..141: mol_type = other DNA
acagctcccgagggctcctttgcctctgctgacgccctcctcagcaggctagctcaccccgtctctctctgtggtgcacttgactatctggagcccgacttagcagaaaagaaccccccactattcgctcagaaactcatg

SEQ ID NO: 1121 - DNA, 27 bp, synthetic construct
  misc_feature 1..27: note = Synthetic
  source 1..27: mol_type = other DNA
cctataaattagaagccatctggaatg

SEQ ID NO: 1122 - DNA, 105 bp, synthetic construct
  misc_feature 1..105: note = Synthetic
  source 1..105: mol_type = other DNA
agagaggattcaagccattgagaaacagattgccagtttaactggccttgttcagtctgcgctttttaaagggcccattacaagttatagcaaagattcgtcatg

SEQ ID NO: 1123 - DNA, 36 bp, synthetic construct
  misc_feature 1..36: note = Synthetic
  source 1..36: mol_type = other DNA
ggcatttttggcagttggagaacaaagcaatccatg

SEQ ID NO: 1124 - DNA, 96 bp, synthetic construct
  misc_feature 1..96: note = Synthetic
  source 1..96: mol_type = other DNA
tgaacctatccccgcttcgtgttctgggggcacccaccctgtaattgcgagacttcctagccccactgtagctaggagcgctgtgcagcctgcatg

SEQ ID NO: 1125 - DNA, 30 bp, synthetic construct
  misc_feature 1..30: note = Synthetic
  source 1..30: mol_type = other DNA
cctcacaggctgtggaccctggccgagatg

SEQ ID NO: 1126 - DNA, 51 bp, synthetic construct
  misc_feature 1..51: note = Synthetic
  source 1..51: mol_type = other DNA
gtcaaaagtccgggtgcggctcctacacggattactgcctgctgttatatg

SEQ ID NO: 1127 - DNA, 66 bp, synthetic construct
  misc_feature 1..66: note = Synthetic
  source 1..66: mol_type = other DNA
atcaatacagattctttttcttcctatcctgttttctctcctgtttctttggattatagcagtatg

SEQ ID NO: 1128 - DNA, 29 bp, synthetic construct
  misc_feature 1..29: note = Synthetic
  source 1..29: mol_type = other DNA
tgcaacaaggattaatagaattggccatg

SEQ ID NO: 1129 - DNA, 37 bp, synthetic construct
  misc_feature 1..37: note = Synthetic
  source 1..37: mol_type = other DNA
ggattaattaaaatcaagttccatcctcagacaaatg

SEQ ID NO: 1130 - DNA, 102 bp, synthetic construct
  misc_feature 1..102: note = Synthetic
  source 1..102: mol_type = other DNA
actaatctagacaaagatctcagcctctgccagacagagttagaggcagatttagaaaaaattgagacgcttaataaagcacccagtgcaaacgtgccaatg

SEQ ID NO: 1131 - DNA, 66 bp, synthetic construct
  misc_feature 1..66: note = Synthetic
  source 1..66: mol_type = other DNA
cctcccaaaaagatattggattatactcctggagactgctctatccttcctagagaggatagaatg

SEQ ID NO: 1132 - DNA, 75 bp, synthetic construct
  misc_feature 1..75: note = Synthetic
  source 1..75: mol_type = other DNA
acactcctgaagaaaacccttatttccctacgtacaaattccctgaacttcctgaaatccagcaaacttccgatg

SEQ ID NO: 1133 - DNA, 96 bp, synthetic construct
  misc_feature 1..96: note = Synthetic
  source 1..96: mol_type = other DNA
caactgccgaccctttacgcgcacgctctatttctgctgttaaaatcattcctgtgaagacagtgaaaaacgcctcaggcctagttctccctaatg

SEQ ID NO: 1134 - DNA, 96 bp, synthetic construct
  misc_feature 1..96: note = Synthetic
  source 1..96: mol_type = other DNA
gtgattctgagccctgccattcaaggggtcatcctggccatagctaaagcccgtcagacctttgaccgagattggtctgaagcagggctgattatg

SEQ ID NO: 1135 - DNA, 33 bp, synthetic construct
  misc_feature 1..33: note = Synthetic
  source 1..33: mol_type = other DNA
acacaacggcgacgacagaaccagcagttcatg

SEQ ID NO: 1136 - DNA, 126 bp, synthetic construct
  misc_feature 1..126: note = Synthetic
  source 1..126: mol_type = other DNA
aataaactactctctaaaggcctgtctcatactcatcctccatctcctccctctcgccttccgtctcctgatccagctgcttcttcctctccatcaactgttgactctgcttctcctgccagaatg

SEQ ID NO: 1137 - DNA, 42 bp, synthetic construct
  misc_feature 1..42: note = Synthetic
  source 1..42: mol_type = other DNA
atagtttcaaacaaaagcatacctcgaaagcgccccagaatg

SEQ ID NO: 1138 - DNA, 71 bp, synthetic construct
  misc_feature 1..71: note = Synthetic
  source 1..71: mol_type = other DNA
gcaatttatcaggaacacagaggttggattctgctacagtcaggacttactcctgctaaagtctcctgatg

SEQ ID NO: 1139 - DNA, 27 bp, synthetic construct
  misc_feature 1..27: note = Synthetic
  source 1..27: mol_type = other DNA
agtttcagttcctgcattcagcttatg

SEQ ID NO: 1140 - DNA, 33 bp, synthetic construct
  misc_feature 1..33: note = Synthetic
  source 1..33: mol_type = other DNA
atcgtggccggagtgtcagtgcccccgtatatg

SEQ ID NO: 1141 - DNA, 43 bp, synthetic construct
  misc_feature 1..43: note = Synthetic
  source 1..43: mol_type = other DNA
tcattgcacaataaggatttttgaatttataatatcatctatg

SEQ ID NO: 1142 - DNA, 105 bp, synthetic construct
  misc_feature 1..105: note = Synthetic
  source 1..105: mol_type = other DNA
acgcagaccaaactggagcattcccgcattaaggagcttgaacagagcctgctctttgaaaagaccaaagctgacaaactccagagggagttagaagacactatg

SEQ ID NO: 1143 - DNA, 48 bp, synthetic construct
  misc_feature 1..48: note = Synthetic
  source 1..48: mol_type = other DNA
aaagcaagacagatctcattggctgtcacaagtgcagttcctgtaatg

SEQ ID NO: 1144 - DNA, 39 bp, synthetic construct
  misc_feature 1..39: note = Synthetic
  source 1..39: mol_type = other DNA
gtctgattaaagtgactcctctctctcggaggtacaatg

SEQ ID NO: 1145 - DNA, 129 bp, synthetic construct
  misc_feature 1..129: note = Synthetic
  source 1..129: mol_type = other DNA
ctcagattctggaacttcagaggctagtctttcacctccttcttccccaccaagccggccccgtaattaactgaatttttttaatcgtcttactgtttctcagggaaacacatcagttcagcaggaatg

SEQ ID NO: 1146 - DNA, 132 bp, synthetic construct
  misc_feature 1..132: note = Synthetic
  source 1..132: mol_type = other DNA
gcacggccagggtggagctctgtgcacagggctcagcggacctggcacacctggacgacggtccctacgaggcggggggagagaaggagcaggacccccgcctcatcccggtccctgccaacagctactatg

SEQ ID NO: 1147 - DNA, 62 bp, synthetic construct
  misc_feature 1..62: note = Synthetic
  source 1..62: mol_type = other DNA
actattaactgctgggagataagaccatctgatttatccgtgtacatacagcagctagcatg

SEQ ID NO: 1148 - DNA, 87 bp, synthetic construct
  misc_feature 1..87: note = Synthetic
  source 1..87: mol_type = other DNA
attgatttagtgaattctttccagagtggaagttccattcagggggctctaaggcggcaaccctccatcgccagccagcatcatatg

SEQ ID NO: 1149 - DNA, 165 bp, synthetic construct
  misc_feature 1..165: note = Synthetic
  source 1..165: mol_type = other DNA
caatctttcgtcagttcgacgcatttacaaggagagtaattcttcctccagtcttccaagtcttcacacttccttctctgccccttccttcactgccccctctttcctgaaaagcttttaccagaattcaggtagactgtccccacagtattaaaattaaatatg

SEQ ID NO: 1150 - DNA, 57 bp, synthetic construct
  misc_feature 1..57: note = Synthetic
  source 1..57: mol_type = other DNA
catctgaatccatttctttgaaaaacttaaaaaggcgatcacaattttttgaacatg

SEQ ID NO: 1151 - DNA, 42 bp, synthetic construct
  misc_feature 1..42: note = Synthetic
  source 1..42: mol_type = other DNA
ggtcatcaggcttttcttacagttcattggtctacctctatg

SEQ ID NO: 1152 - DNA, 141 bp, synthetic construct
  misc_feature 1..141: note = Synthetic
  source 1..141: mol_type = other DNA
gttcccagtgcccccgacaagcccctgctggtgtctccatctcctgccaagcatcctccagtgcctcctcctgtgggcctggcctcagggctattgacagactcctgtcccatcccagagacccctcgtgatcgtgccatg

SEQ ID NO: 1153 - DNA, 141 bp, synthetic construct
  misc_feature 1..141: note = Synthetic
  source 1..141: mol_type = other DNA
ccattagaagccgatccattggtgaatttgctctgccatcggcctatatacgcagtgctaaaagtgctcctgttctgatccatacttccaaacccttcttgcctgatattgttctcactcccctttctgattagctttatg

SEQ ID NO: 1154 - DNA, 51 bp, synthetic construct
  misc_feature 1..51: note = Synthetic
  source 1..51: mol_type = other DNA
gcaactctccagaagcatactttcattgttttccttcccttttttcagatg

SEQ ID NO: 1155 - DNA, 151 bp, synthetic construct
  misc_feature 1..151: note = Synthetic
  source 1..151: mol_type = other DNA
cctgaccaagaaggcgtcaccataccagatctggggagtctctcctcacctctgatagacacagagaggaatctgggcctgcttctcggattacacgcttcctatttagcaattagcacaccgctgtctcctgtcgagattgaatttgatg

SEQ ID NO: 1156 - DNA, 87 bp, synthetic construct
  misc_feature 1..87: note = Synthetic
  source 1..87: mol_type = other DNA
cattacctggccaggaatttctacaacctgaggttccttgctctgtttgtagccttcgctatcaacttcatcctgcttttttatatg

SEQ ID NO: 1157 - DNA, 168 bp, synthetic construct
  misc_feature 1..168: note = Synthetic
  source 1..168: mol_type = other DNA
acattgaggtatcttcatcttctgttaccacaattgcaagtatcccagaaatcacacctaaagtgattgatacctggagacctaaactgacaagctctcggaaatttgtagttcaagattatccaaacacttctgattttactgatcctttatcgggtatcccaaatg

SEQ ID NO: 1158 - DNA, 39 bp, synthetic construct
  misc_feature 1..39: note = Synthetic
  source 1..39: mol_type = other DNA
cgagccatttcctccaaccgattagcaattggttgcatg

SEQ ID NO: 1159 - DNA, 107 bp, synthetic construct
  misc_feature 1..107: note = Synthetic
  source 1..107: mol_type = other DNA
aacgtattttcagcagcattttgaagcacccctggcgtgcactgcacagggaaaccaggaccacattggtgtgctgtgtcctccttaccaactggctcttggagatg

SEQ ID NO: 1160 - DNA, 98 bp, synthetic construct
  misc_feature 1..98: note = Synthetic
  source 1..98: mol_type = other DNA
ggctggagactctgaaagacacaccgcccccacggctcatcaagtcacacctgcccctggctctgctccctcagactctgttggatcagaaggtcatg

SEQ ID NO: 1161 - DNA, 39 bp, synthetic construct
  misc_feature 1..39: note = Synthetic
  source 1..39: mol_type = other DNA
ttgcgtacttgaaggaccgaaggctgagtggaggagatg

SEQ ID NO: 1162 - DNA, 87 bp, synthetic construct; identical to SEQ ID NO: 942
  misc_feature 1..87: note = Synthetic
  source 1..87: mol_type = other DNA

SEQ ID NO: 1163 - DNA, 38 bp, synthetic construct
  misc_feature 1..38: note = Synthetic
  source 1..38: mol_type = other DNA
tacgattccaactgttaagcctgcaggaatcctccatg

SEQ ID NO: 1164 - DNA, 69 bp, synthetic construct
  misc_feature 1..69: note = Synthetic
  source 1..69: mol_type = other DNA
gtcacgagcattatttccgagttaagcacctgtccgaggccttgaacgacaagcacgggccgctggatg

SEQ ID NO: 1165 - DNA, 153 bp, synthetic construct
  misc_feature 1..153: note = Synthetic
  source 1..153: mol_type = other DNA
ggcttcttccctgtaccccaaggggcggcctgcctggcccctggataaacgctgcttgtgtttgtgcggccgacatctcgccaggtcacgagcattatttccgagttaagcacctgtccgaggccttgaacgacaagcacgggccgctggatg

SEQ ID NO: 1166 - DNA, 49 bp, synthetic construct
  misc_feature 1..49: note = Synthetic
  source 1..49: mol_type = other DNA
gtcagcttgcaaggttgaattcaatatccttttatcacactcctctatg

SEQ ID NO: 1167 - DNA, 123 bp, synthetic construct
  misc_feature 1..123: note = Synthetic
  source 1..123: mol_type = other DNA
actaagcagtcttctggggaaaagctcattgattgctctgaaatcttcagtttattagagtctgcgcgaaaaccaacagaattcataggaggggttacttctacttctcaaagctgggttatg

SEQ ID NO: 1168 - DNA, 120 bp, synthetic construct
  misc_feature 1..120: note = Synthetic
  source 1..120: mol_type = other DNA
cttgcagaagattgtgcgtccggatcagccacaaacagtaacaaccatctaatcgagcctcagatccgccggcctcgtagcctcagctcgccaacagtaactttatctgccccgctgatg

SEQ ID NO: 1169 - DNA, 80 bp, synthetic construct
  misc_feature 1..80: note = Synthetic
  source 1..80: mol_type = other DNA
ggttaccctcgatccctctaaacggcagaactctaaccgctgtgtttcgggcgcctctctgccccagggatccaagaatg

SEQ ID NO: 1170 - DNA, 27 bp, synthetic construct
  misc_feature 1..27: note = Synthetic
  source 1..27: mol_type = other DNA
gagaccaaggagatcagctgggagatg

SEQ ID NO: 1171 - DNA, 108 bp, synthetic construct
  misc_feature 1..108: note = Synthetic
  source 1..108: mol_type = other DNA
cacggagcagccgtatccctcgacccagcattagtcaggggtgcagccgcgataccagccgtgagagcagccgagatacaagccctgctcggggctttcctccacatg

SEQ ID NO: 1172 - DNA, 45 bp, synthetic construct
  misc_feature 1..45: note = Synthetic
  source 1..45: mol_type = other DNA
aaagaaaagtaaactgttttcgcggctgcgcagaaagaagaaatg

SEQ ID NO: 1173 - DNA, 60 bp, synthetic construct
  misc_feature 1..60: note = Synthetic
  source 1..60: mol_type = other DNA
gacgctgcattgggatacagatccatcagttcttcagcttcactcagattccgatttatg

SEQ ID NO: 1174 - DNA, 129 bp, synthetic construct
  misc_feature 1..129: note = Synthetic
  source 1..129: mol_type = other DNA
attttcacatttcacacgaaactcgtattcaagaccttcaataaggtttttcactgaaaagacagtttctcgaatttcttctgttgtcacagaaatccatttattctgcttcttctcacgcttctcatg

SEQ ID NO: 1175 - DNA, 72 bp, synthetic construct
  misc_feature 1..72: note = Synthetic
  source 1..72: mol_type = other DNA
gaactcaattagttaaaggaccagattcaggatttagaaggcaaatacattcagggattgaaagagattatg

SEQ ID NO: 1176 - DNA, 27 bp, synthetic construct
  misc_feature 1..27: note = Synthetic
  source 1..27: mol_type = other DNA
ccaacactgtgcctggaggacccaatg

SEQ ID NO: 1177 - DNA, 135 bp, synthetic construct
  misc_feature 1..135: note = Synthetic
  source 1..135: mol_type = other DNA
cttcctggtggccgacttcaggcggcggggcgtggacgtgtctcaggtggcctggcagagcaagggggacacccccagctcctgctgcatcatcaacaactccaattgcaaccgtaccattgtgctccattaatg

SEQ ID NO: 1178 - DNA, 107 bp, synthetic construct
  misc_feature 1..107: note = Synthetic
  source 1..107: mol_type = other DNA
caaaacaatatcagtcaaggtaattgattattaggagtattagaaaaacaagaccttcttccttgagattggagagccccgcctggtggagattagtgagaagaatg

SEQ ID NO: 1179 - DNA, 54 bp, synthetic construct
  misc_feature 1..54: note = Synthetic
  source 1..54: mol_type = other DNA
ctaggactcagattggatcaaaattcacacggtggggatcacagggagaaaatg

SEQ ID NO: 1180 - DNA, 93 bp, synthetic construct
  misc_feature 1..93: note = Synthetic
  source 1..93: mol_type = other DNA
aagcatcctcatcttctataagggagcgaccacctgaagaagttgcagctcgccttgcacaacaggaaaaacaagaacaagttaaaattgatg

SEQ ID NO: 1181 - DNA, 57 bp, synthetic construct
  misc_feature 1..57: note = Synthetic
  source 1..57: mol_type = other DNA
gaagttatcaaggaggattctgctgaggggctttcttcacccacagactcctcgatg

SEQ ID NO: 1182 - DNA, 78 bp, synthetic construct
  misc_feature 1..78: note = Synthetic
  source 1..78: mol_type = other DNA
cacagtttgctgcttttctgaaacaaaatattctggtgaggaaagctcttcctcctggcacctcctcctgtctctatg

SEQ ID NO: 1183 - DNA, 189 bp, synthetic construct
  misc_feature 1..189: note = Synthetic
  source 1..189: mol_type = other DNA
caaagatcacctgtctattctggatttgtgtttccttccgctctttctcctcatcctatcactcaacatacatcagccccattgcctgaattcattgctacatctgtcgatcctttacctttaaattacacacctcctcctttaccagctaagaaacacagaaggcagcagcagcagcaggagcaaatg

SEQ ID NO: 1184 - DNA, 36 bp, synthetic construct
  misc_feature 1..36: note = Synthetic
  source 1..36: mol_type = other DNA
gagcaattagtaattccaaaagttcaagtatcaatg

SEQ ID NO: 1185 - DNA, 150 bp, synthetic construct
  misc_feature 1..150: note = Synthetic
  source 1..150: mol_type = other DNA
agctccccacgattagattgtgctgtgctggctctgcagtttctctctcttcagtcccattttccggaagtgtgatattcgtctttatctggtttttccattcctttttctcaaatagtatctactctctccttttctcttccttctatg

SEQ ID NO: 1186 - DNA, 81 bp, synthetic construct
  misc_feature 1..81: note = Synthetic
  source 1..81: mol_type = other DNA
attatagtgaaaaaaaaccccagcgacgcaatcgtagccgcaggcgtcgcttcaggggtcaggcagaagatagacagcatg

SEQ ID NO: 1187 - DNA, 102 bp, synthetic construct
  misc_feature 1..102: note = Synthetic
  source 1..102: mol_type = other DNA
gccctagagaaacagaaagaatacattgcctgccttaggaattagcgagatattctcagagaggagctggctgacctgcaggagacagtgaagacgggaatg

SEQ ID NO: 1188 - DNA, 93 bp, synthetic construct
  misc_feature 1..93: note = Synthetic
  source 1..93: mol_type = other DNA
gagaagcagcgcattcagcagaaaatagacaccattacaaaagaggtgtttgacctccaggagacacttctttggaaagataaaaaaattatg

SEQ ID NO: 1189 - DNA, 51 bp, synthetic construct
  misc_feature 1..51: note = Synthetic
  source 1..51: mol_type = other DNA
tactctcttcattcctttgatcggaagtggggacagattcagaagtggatg

SEQ ID NO: 1190 - DNA, 117 bp, synthetic construct
  misc_feature 1..117: note = Synthetic
  source 1..117: mol_type = other DNA
ttttgaatatactaacactgaatcagcacttctaaagcccttccttctcccactggcttcacttggctttcagacataattaggagactggcttttcgaggcgctggttgtgctatg

SEQ ID NO: 1191 - DNA, 69 bp, synthetic construct
  misc_feature 1..69: note = Synthetic
  source 1..69: mol_type = other DNA
ggaaaaagagagaaatttattagcatcctgtcttctgcttggcctcccaagtgattgatttaaccaatg

SEQ ID NO: 1192 - DNA, 30 bp, synthetic construct
  misc_feature 1..30: note = Synthetic
  source 1..30: mol_type = other DNA
ctactgttgaggctattgaggctgattatg

SEQ ID NO: 1193 - DNA, 99 bp, synthetic construct
  misc_feature 1..99: note = Synthetic
  source 1..99: mol_type = other DNA
taaacttcacctgccaacggctcctcccccacttaattagggagaaagtttggtcagccgcattcttcagctggggcctcctggaaccaaattcctatg

SEQ ID NO: 1194 - DNA, 92 bp, synthetic construct
  misc_feature 1..92: note = Synthetic
  source 1..92: mol_type = other DNA
gctttgagttacacaggtagccacattaaagtccacttacccagtttagtagagaattaaatcctgaaagaggattgatcaataattaaatg

SEQ ID NO: 1195 - DNA, 42 bp, synthetic construct
  misc_feature 1..42: note = Synthetic
  source 1..42: mol_type = other DNA
gagccccaaactactgtaatccacaaccctgattgaaacatg

SEQ ID NO: 1196 - DNA, 151 bp, synthetic construct
  misc_feature 1..151: note = Synthetic
  source 1..151: mol_type = other DNA
tcctggatcagtgagagtgtggaggccgacgtgcgcctccgcctggccaatttgtcggagcgggacgggggcgagtacctctgtcgagccaccaatttcataggcgtggccgagaaggccttttggctgagcgttcacgggccccgagatg

SEQ ID NO: 1197 - DNA, 188 bp, synthetic construct
  misc_feature 1..188: note = Synthetic
  source 1..188: mol_type = other DNA
gaattcaaacccattggtaccgcgcacaacagaagggcccagccttttgttgcagctgcaaacattgattacaaaagacaggtagtgagcgcttcctataactcgccaattgggctctattcaactagcaatatacaagattcgcttcacggacagctgcggggtctcattcctagctcacctcaatg

SEQ ID NO: 1198 - DNA, 45 bp, synthetic construct
  misc_feature 1..45: note = Synthetic
  source 1..45: mol_type = other DNA
ccatttccctgaacctgaggattattgctgctctcctgattaatg

SEQ ID NO: 1199 - DNA, 54 bp, synthetic construct; identical to SEQ ID NO: 979
  misc_feature 1..54: note = Synthetic
  source 1..54: mol_type = other DNA

SEQ ID NO: 1200 - DNA, 39 bp, synthetic construct
  misc_feature 1..39: note = Synthetic
  source 1..39: mol_type = other DNA
aaaaccagtctatccaagaccaggcacctattttggatg

SEQ ID NO: 1201 - DNA, 60 bp, synthetic construct
  misc_feature 1..60: note = Synthetic
  source 1..60: mol_type = other DNA
aacacctacacctctataggtgctggtccgtttcctctgtggaatttctaggctccaatg

SEQ ID NO: 1202 - DNA, 45 bp, synthetic construct
  misc_feature 1..45: note = Synthetic
  source 1..45: mol_type = other DNA
aaaggaaaatatcccaaggactaatctgatcgggtcttccttatg

SEQ ID NO: 1203 - DNA, 132 bp, synthetic construct
  misc_feature 1..132: note = Synthetic
  source 1..132: mol_type = other DNA
gggagaatttcgatcgccaggccagccttcggcggtctctaatttacacagacactctggtaagacgaccgaagaaagtcaaaaggagaaagactattacaggagtccctgacaacatacagaaggagcatg

SEQ ID NO: 1204 - DNA, 100 bp, synthetic construct
  misc_feature 1..100: note = Synthetic
  source 1..100: mol_type = other DNA
cggtgttgggcctgcttgccgcgggagtgacgctacttcttccagagaccaagggggtcgctttgccagagaccattaaggacgccgagaaccttggatg

SEQ ID NO: 1205 - DNA, 151 bp, synthetic construct
  misc_feature 1..151: note = Synthetic
  source 1..151: mol_type = other DNA
gagggtcccccccagctgaccagaccctggtcatcaagacattccgcttcctgtcacagaaactctttatctccgtctcagttctctccagcctgggcattgtcctagctgttgtctgtctgtcctttaacatctacaactcacatttatg

SEQ ID NO: 1206 - DNA, 60 bp, synthetic construct
  misc_feature 1..60: note = Synthetic
  source 1..60: mol_type = other DNA
cattcttctgattctccttcaaggtccccaaagacattgttgggttctgacacagtcatg

SEQ ID NO: 1207 - DNA, 72 bp, synthetic construct
  misc_feature 1..72: note = Synthetic
  source 1..72: mol_type = other DNA
ttcatcatcattggagtaaaattttacgttcggaatcaaactcttcaattactactactcagcctactaatg

SEQ ID NO: 1208 - DNA, 27 bp, synthetic construct
  misc_feature 1..27: note = Synthetic
  source 1..27: mol_type = other DNA
cttggattcctatccggtaacttcatg

SEQ ID NO: 1209 - DNA, 99 bp, synthetic construct
  misc_feature 1..99: note = Synthetic
  source 1..99: mol_type = other DNA
gcgtgtgaccccctgccgcacgaggaggagccctctgaagtgccacagctgcgccagccctacgctcctccccggcccggcgcccgccccacacacatg

SEQ ID NO: 1210 - DNA, 75 bp, synthetic construct
  misc_feature 1..75: note = Synthetic
  source 1..75: mol_type = other DNA
tgggcagacagaccaccgctccggccacaatttccaccgcggcctccggcaccaccattgggctggtggaacatg

SEQ ID NO: 1211 - DNA, 45 bp, synthetic construct
  misc_feature 1..45: note = Synthetic
  source 1..45: mol_type = other DNA
ttcgtctgagcaaaactcagtccgagccttccctgagctgtcatg

SEQ ID NO: 1212 - DNA, 112 bp, synthetic construct
  misc_feature 1..112: note = Synthetic
  source 1..112: mol_type = other DNA
cttagatttgttgacagcggtttcctggagtgctgtcttgagaacgattctgaggaggctcagcaagaaagagtgtttcagttgattgggtgtgtctgtcattgagaagatg

SEQ ID NO: 1213 - DNA, 57 bp, synthetic construct
  misc_feature 1..57: note = Synthetic
  source 1..57: mol_type = other DNA
cctattggtgtaggtataccaacaattaatttaagaaaaaggagacccaatatcatg

SEQ ID NO: 1214 - DNA, 108 bp, synthetic construct
  misc_feature 1..108: note = Synthetic
  source 1..108: mol_type = other DNA
ggtcttgctttgtctcccaggctggtgtgcagtggtgcgaccacggctcacggcagcctcagccacccagatttaagcgatctggttcccacctcagcctcccgaatg

SEQ ID NO: 1215 - DNA, 27 bp, synthetic construct
  misc_feature 1..27: note = Synthetic
  source 1..27: mol_type = other DNA
atcactacattccaagctatcagaatg

SEQ ID NO: 1216 - DNA, 33 bp, synthetic construct
  misc_feature 1..33: note = Synthetic
  source 1..33: mol_type = other DNA
tgtccattttacttcactgaagaaacatacatg

SEQ ID NO: 1217 - DNA, 67 bp, synthetic construct; identical to SEQ ID NO: 997
  misc_feature 1..67: note = Synthetic
  source 1..67: mol_type = other DNA

SEQ ID NO: 1218 - DNA, 95 bp, synthetic construct
  misc_feature 1..95: note = Synthetic
  source 1..95: mol_type = other DNA
agccagaattaagaattgggaggtttgtctgaggatatcttattataaagagcagtctaaggctttagtccctttgatccccaacttatttaatg

SEQ ID NO: 1219-1328 - skipped (110 entries)

SEQ ID NO: 1329 - DNA, 168 bp, unidentified
  misc_feature 1..168: note = May be homo sapiens or mus musculus
  source 1..168: mol_type = genomic DNA
gtaagtcaggaaagcagtcatctcagcttaccttgctttgtgttaagagcatgacctaggattgccactcattctggttgaaatatcttgccgactcaccttctaacttcccgaatcatttttttcaccttcactcttgaaagataacttcagtagattagggtctta

SEQ ID NO: 1330 - DNA, 181 bp, unidentified
  misc_feature 1..181: note = May be homo sapiens or mus musculus
  source 1..181: mol_type = genomic DNA
gtgagcacttctgcatttgtgtgcttgcgattggcagccccacactgtgttgctctgcatggctcgggctggatggcagagtttaaaaaaacaacacgggtacacgttacaaatgtaagagggagggaaagctctgtttgcttattttttggaaatgtatttactgttatttctgtggtgt

SEQ ID NO: 1331 - DNA, 251 bp, unidentified
  misc_feature 1..251: note = May be homo sapiens or mus musculus
  source 1..251: mol_type = genomic DNA
gtgggtgaaacatccctgtggaggatcccagttattgagtcttagtcacagatgataatgtgatgctgatttgcatttaccttgctggaggcaaggcaggcgtgggcaggctgtcacagtcatggaacatgtgtgggagctgtgagagtcagaaggaaaatacattatcctcatgaacaggcccagtttctattcctggtctgggagaataatcattttgaggttgttggcttgtggttgatctcctggtg

SEQ ID NO: 1332 - DNA, 194 bp, unidentified
  misc_feature 1..194: note = May be homo sapiens or mus musculus
  source 1..194: mol_type = genomic DNA
gtaactatctgacagtagagtggggctgggatcttggcttgtgggtggatgggggtacaagctatgcatagtggtgtgctttggttttatcctttggaaactagaatctccacccttatctttgaaacattggtgctggttatttgtttggcaaaagctttggaggcatggccgggcgcggtggctcacgcctg

SEQ ID NO: 1333 - DNA, 140 bp, unidentified
  misc_feature 1..140: note = May be homo sapiens or mus musculus
  source 1..140: mol_type = genomic DNA
gttattaatgtcaagtgtccttaagcagctgatagaattgttttttaatactgctactgtgtaataaggtgcttcccttttcccattcaaaaagagagctaatgcgcttgcagcttacccctcctttccttgcatatggg

SEQ ID NO: 1334 - DNA, 179 bp, unidentified
  misc_feature 1..179: note = May be homo sapiens or mus musculus
  source 1..179: mol_type = genomic DNA
gtaggaactgttttttcactttatggcacggttttaccaattggaaaaaagtaatttttataccccaaaagggtgtaaaacattggtgattatttttgaaaaagggcttttcaaaactgagccatattggaaaaaatcagcacttacccgatcctgtgcaagcaggctctaaacaacac

SEQ ID NO: 1335 - DNA, 209 bp, unidentified
  misc_feature 1..209: note = May be homo sapiens or mus musculus
  source 1..209: mol_type = genomic DNA
gttagtatgccctctttcttttctctgcacgagtgagtgtgtgtcagagagccgtgtaaccaatggtgtggctttgcattgattctgcttctgttgaagagtcttcctgcttctttctgttctggtcattgcatggctacagagctgtccatgtgtaaaaatggagtatatggaagatcgtaagtgcactcttggtgttggccatgtcg

SEQ ID NO: 1336 - DNA, 217 bp, unidentified
  misc_feature 1..217: note = May be homo sapiens or mus musculus
  source 1..217: mol_type = genomic DNA
gtaccctgcctgagagccgcgagaccctccccactaaaacaggactcaccaacccgccgagaccctgccggtccggctgctgctccgcggccatttaaaccaccactaacccccacgtgtgctcccggtcggtgcacagccacattcccgtgtagcctcggccccatgtaacacggcacctatcacgtgtgtgtgctttccactctgggtggaggct

SEQ ID NO: 1337 - DNA, 246 bp, unidentified
  misc_feature 1..246: note = May be homo sapiens or mus musculus
  source 1..246: mol_type = genomic DNA
gtttgtgccaataggccacttgttcctctttccctccaccccctcagtttttttcttctcccttactcccttttccttaaaaaaattataaaatgaaggttcaaacaaacttcaatgagcaacattttatcatttttctttcttttttaaattatggcaaaacagaagcttgcagaaaaaactgaagatctgataagaatgaggaaggttagccatttttcactttcacaaaactacattgccatt

SEQ ID NO: 1338 - DNA, 224 bp, unidentified
  misc_feature 1..224: note = May be homo sapiens or mus musculus
  source 1..224: mol_type = genomic DNA
gtactctgtctttgtgtgtgtgtgaagccataaaatctaatgttacgtgtgcggtggtgctgtgaggtatgcttctcgtgcaagcggctccctcagccctgctgtggtaaagaccaagtataaattgtcgctaacagggttttctcattagagtcgtgtgcctgagtgtcccctgtgaattataatgcctccagccctcttgctgctcctctgctctgcctgtc

SEQ ID NO: 1339 - DNA, 255 bp, unidentified
  misc_feature 1..255: note = May be homo sapiens or mus musculus
  source 1..255: mol_type = genomic DNA
gtaagtttaatgtaatctttttgtttccctttacttctgcagagcattataaccagtcatatcaggagaagcctgaattactactcatttttcaatgccaactactcactgctttttgttgttgactcttgcagtttcctttaagctcccttctttcagcaatcatttgcaggggaaatgacaatcttaaaatttttctaagtgtgggttcagattgaatcactttgcatgtattaacttgaagggttaatcatg

SEQ ID NO: 1340 - DNA, 198 bp, unidentified
  misc_feature 1..198: note = May be homo sapiens or mus musculus
  source 1..198: mol_type = genomic DNA
gtttgtagcccacgtgtgaccttttgggagtttgtcaaaacctcagtagagaatgaacccccgaggcccaaatgaaataaggcaggatttgatgaggaactgccgagaacgttcccagtgacatatcttcccctcaaaggatggtatatgtgacgttctttccccacgataccaaagtgatgtaaattgtgtgattac

SEQ ID NO: 1341 - DNA, 385 bp, unidentified
  misc_feature 1..385: note = May be homo sapiens or mus musculus
  source 1..385: mol_type = genomic DNA
gtatgagtttttgtttttgcatttttaaaaaaatcttgaattcaggaaaatacatgcatgacttttggcttggaatggtttggctttttgtggacggcatgaagtggcttgagatcaaagcttgaatttttttttttttttaataaagtcctgaatctgagactgcgttattttcagctccaccaccactcctctcccccacctctcccaataaaacagtctatttggaaagacttcaaaacatttattcatccagccacagtaatattagtggtggtaattttcctgccttctccggaatattttaagccatcgattttatgtttgcattgttaatacgtccttttgggtcctaagaacctctgcctaaagtataaagccgtat

SEQ ID NO: 1342 - DNA, 222 bp, unidentified
  misc_feature 1..222: note = May be homo sapiens or mus musculus
  source 1..222: mol_type = genomic DNA
gtaaaaaagaagaaagccaatgaaaaaaataattcaatctgtttctcttttaatcattaagataattcattcattcaaatctgttttcttgtaatcatttcaaggctgaaaatattcacatctctatggatcatgggcgttatttttttgttttggggggtttggttgctttttttctttcctccttctggtaattcttggtcgaaagtaacactttggccc

SEQ ID NO: 1343 - DNA, 130 bp, unidentified
  misc_feature 1..130: note = May be homo sapiens or mus musculus
  source 1..130: mol_type = genomic DNA
gtaaacagctgtaggctttggattggtgtgtaagaaatatgcgtggcccgcatgtcttagaaatgtaattaaaggaacgatttagttatagtccacttttttggggggatgtggttttgtggagtaacat

SEQ ID NO: 1344 - DNA, 227 bp, unidentified
  misc_feature 1..227: note = May be homo sapiens or mus musculus
  source 1..227: mol_type = genomic DNA
gtactggacagatacagatgcatgcggcacccggtgcaaaggtgccgaacagcagatgcatcctaaagtcttgaatgtctgtcgtttgtttgacaaacaagtcaatgccgtgagttgttccagaatgcgtggcattttgttttgtcatagcacaaggtgctgataaccacatgctggcgtgcgtgggaaaacattttgtctctctgcatatgttatgtgttagaact

SEQ ID NO: 1345 - DNA, 211 bp, unidentified
  misc_feature 1..211: note = May be homo sapiens or mus musculus
  source 1..211: mol_type = genomic DNA
gtaggggactttcctgtccatcacacccgtgcctccctgcccagccccgctgccttgcccgcatccagccgtgggacagactagcagttgagtgcagagattggccgggggtctgcaggccctgtgatcatgggtgctgccggccgggcaatgtcacgttcaggcctcacgcgtagccgacgctgtcttcccggggtgcgcggtcagtggt

SEQ ID NO: 1346 - DNA, 249 bp, unidentified
  misc_feature 1..249: note = May be homo sapiens or mus musculus
  source 1..249: mol_type = genomic DNA
gtaaaattctgctattttccacctgtttccatgcagcaacccatggcaaagagtactgagaaaattccatttggtttccttgttttcccctttaccaattcctagataattcactaaaaggaatcctgagcctgagattcttcctccattttcactttaaggttagcagagattccagggaaaaagtggaaactgaaacaatgaccaaatggccactttttctttatgtaaggggttggcctcacatga

SEQ ID NO: 1347 - DNA, 194 bp, unidentified
  misc_feature 1..194: note = May be homo sapiens or mus musculus
  source 1..194: mol_type = genomic DNA
gtgagtaaggttttctaatgtttactaatcactaggtcctttatatgtgcctttgtttctgattctcatgtacttgtctctcactacttcttaagggctcacctgtatctattttatctttgtgttcctgtaataataggtagggctttagacatagtagccagttagtctgttgactggattttctcattagc

SEQ ID NO: 1348 - DNA, 260 bp, unidentified
  misc_feature 1..260: note = May be homo sapiens or mus musculus
  source 1..260: mol_type = genomic DNA
gtatgacaattaatggttctgcatgacctagccactgctgggggttttcttctataacgttgtccttgtgaaaacttttgtgaaattaaaaaaaaaggagttacaaattttattctgttattggtttgtttatttttatttatattgttctgtttgtggttttatttattttgttttgcttttccccccctcccctttccctctccttttcccttccttcttctcttccttccttcttccactttctaaattgctcagcg

SEQ ID NO: 1349 - DNA, 244 bp, unidentified
  misc_feature 1..244: note = May be homo sapiens or mus musculus
  source 1..244: mol_type = genomic DNA
gtaaagttcacacattcttcccatgtctgttcagaaaagaaacctattcagatataagttaagctaatttagtaatcctagaattgtcctctgagagatttagatggatgggccacttcacagtagcagccaactcacgggagcacctgggcaacgctagtggacttttttgtagtgagtgtgttgatcatagaaaatgtagatataaggaaataaactttgaggatagagaattaacattatt

SEQ ID NO: 1350 - DNA, 219 bp, unidentified
  misc_feature 1..219: note = May be homo sapiens or mus musculus
  source 1..219: mol_type = genomic DNA
gtatttcctagtttttctcatgccatcagttccttttcaagctgtgctttgttttcttctttgttctatggtttttgatgtagttgaggtgacggatggtgatgctggctattttaggctgcatggctttctgactactgttttagactccttcccccacacctacccagttcatttttgcttggttttcttttgagcttggcatcttccttaaagggg

SEQ ID NO: 1351 - DNA, 203 bp, unidentified
  misc_feature 1..203: note = May be homo sapiens or mus musculus
  source 1..203: mol_type = genomic DNA
gtaattccgctgtgcctcctccgttggactgtgtgtgctctctagccttggttagtgtgagtgtgttgtgggtttgtttgtttgtttgtttgttttcttaaatcacttttgaaaaaacttgatgcttttttttttttggttaggtaataaaactatgtaacaaattctctaagacatatactaatgtttagaggtttttaaag

SEQ ID NO: 1352 - DNA, 237 bp, unidentified
  misc_feature 1..237: note = May be homo sapiens or mus musculus
  source 1..237: mol_type = genomic DNA
gtaccataaacttagacagcatatctgttgtccgagctttaaattaattcttatagttccattgtaggcataagatttgggcttttagattttattttcatagtcatttttggctggtgaaaattttatttcactcatttgcatgatgtgctatgttaaaataactaaatcctttctaattcattaatctatttttaagtgtgatgcctgtgtgctttaataacactaaaataggta

SEQ ID NO: 1353 - DNA, 223 bp, unidentified
  misc_feature 1..223: note = May be homo sapiens or mus musculus
  source 1..223: mol_type = genomic DNA
gtatctccttgggtcggtcgattttctctaactgtgagcggatcatggcatggttttcctttcttcttttcttctaacacgcactttgagctgaatcgttgcatgtttaggaggcattccgtctcacttcctcagcttgcttccttacttcctctgtgtatgtgaatgtctgtgtgcgttttcctgagagccagcgaatgtggggaggaactgaggacagagg

SEQ ID NO: 1354 - DNA, 227 bp, unidentified
  misc_feature 1..227: note = May be homo sapiens or mus musculus
  source 1..227: mol_type = genomic DNA
gtatctctgtttttaaaattctaattcttacaatataggcatcataatattggggaaataattctataagaagggaaaaaatggggttaaggctgggtgtggtggtgtgtgcatgtagtcccagctactcaggaagctgaagtagaggctcacttgagctcaggagttggaggctgaaatgtactgtgattgcaccactgcactccagcctgggcaacataatgaga

SEQ ID NO: 1355 - DNA, 209 bp, unidentified
  misc_feature 1..209: note = May be homo sapiens or mus musculus
  source 1..209: mol_type = genomic DNA
gttggtatcacattactgtttatctactttctcagcactgctgagaggcaaggcaagcctgggaaaaagagaaatgtagtcttcaagggaaatcatgtttcaagtagactgacctcataaatatactataattttttaaggtttgaaaagatgtcgagtcttgtcatttctgttgtgagttcagtacccaatggatgcaagctgagatg

SEQ ID NO: 1356 - DNA, 185 bp, unidentified
  misc_feature 1..185: note = May be homo sapiens or mus musculus
  source 1..185: mol_type = genomic DNA
gtagttgtcctgaacaatttgctttccctattccctgcatgttcccagatgttctcatgctccacttgacctgcacaaacatcttgagcctggcttggctggaataaaaatttgtaagatattttacaccagtgctggattcaattttgtttttgtgttagagcacacaacacggcagaacaggc

SEQ ID NO: 1357 - DNA, 204 bp, unidentified
  misc_feature 1..204: note = May be homo sapiens or mus musculus
  source 1..204: mol_type = genomic DNA
gtagctctctcaacttttcagacttgtggttttcctttccctttttccctcttcccttgttcctcctgcctttctcatttcctgggatgctagctttaaaatctctggaatggcatgggggtaggagcagtggaatttctgctgtgctctactcctcaaagtcctgaaggctgcctttaccactgcttgtttcccacaaacctg

SEQ ID NO: 1358 - DNA, 228 bp, unidentified
  misc_feature 1..228: note = May be homo sapiens or mus musculus
  source 1..228: mol_type = genomic DNA
gtgagtagagagcaccacaacccctagagatggctcagaggcacagcaggagtcatcggagctgcagtgccagactaggggtgtggaccatgaaagccagtgcagtttttggggaatttaaaatatatatagacacaagctctccgtacccattaagatcattttgttgttacaattgatcataaagaggttagtgtgtcctctttttttaaggaaaaaaatgtattt

SEQ ID NO: 1359 - DNA, 261 bp, unidentified
  misc_feature 1..261: note = May be homo sapiens or mus musculus
  source 1..261: mol_type = genomic DNA
gtaggaaagctatttttcctcatctgtattacagcctatgaatgtgttctctcgtaacaatggtagatcccctctcctctcctccccaaatcccatcccctaggcttgggctccccccaggtggctcagcagcagttcctaaagcatgcaggaacgtgtctgatggtgcaaaaatcatgggttggagacacacatgaaccgtccctagggcagcagcaaaggatcatggcactaaaaggcgtctctcaacctaacctggct

SEQ ID NO: 1360 - DNA, 240 bp, unidentified
  misc_feature 1..240: note = May be homo sapiens or mus musculus
  source 1..240: mol_type = genomic DNA
gtactgtacccattccaggtgaggtggagagtgagaatgcctttgtttccctaccctaaccctccccttcaccagcactcagccagggacccactactgcctgcgttcctgcatctccctctgaggaaaaagaagctgcttgttggaataatccacaagtactttggaccccaaatccttaaaattaaagacattagctcacctagatttgaaatattgagcacactaatttctcagcaa

SEQ ID NO: 1361 - DNA, 231 bp, unidentified
  misc_feature 1..231: note = May be homo sapiens or mus musculus
  source 1..231: mol_type = genomic DNA
gtaagctttcatatggttttggcatatgaagcttatgactgtcataagccataccaagcctgtggagtatggcatgattttcattacataatccaatgaaaatagacttattttaaatccctaactttgtagttttaatttgtatttcactatcttgaaattaacagctagtacttatccatcacagcagtctcctactgacatgaagcaagttgttgaatgcagtagagc

SEQ ID NO: 1362 - DNA, 222 bp, unidentified
  misc_feature 1..222: note = May be homo sapiens or mus musculus
  source 1..222: mol_type = genomic DNA
gtaatggttttcactatttaatgaagcagacccatgcatgtgaagggtggacacctcaggtgacatgctttatagttggcctgagccttgacccagtggttcaacctgagtttggtcttggtaccattcaggtgtttgtgagctgagactgatgagtaggaacaggtgttttatatctcgtcttttgtcaaaagtaaagactcattcctttggtaacccaac

SEQ ID NO: 1363 - DNA, 224 bp, unidentified
  misc_feature 1..224: note = May be homo sapiens or mus musculus
  source 1..224: mol_type = genomic DNA
gtgagctccacaagtcagtgcagatgttagcgctggcctaatcggaatgagctgcgtgtctccttatccctaaagtctgcagtagaagcatgctgtcttttgagctacttattacttctccctcttcctgcatggccccattgctttatgtctgattacctcggaaagtcatcttggcagcagctgaaactacacagaccataccttttattagagttcccacc

SEQ ID NO: 1364 - DNA, 255 bp, unidentified
  misc_feature 1..255: note = May be homo sapiens or mus musculus
  source 1..255: mol_type = genomic DNA
gtactttctttcctgcctttcctacattctggaatttcattgatgttctaaagtgccttcctagaaattctaagcaagtctcatttttgttgcatgcatcacttgttgtaaatcatataaatgcactaatatttctaaacatgataattttaatacatttttgtggtcataccttttagataaagtagtggttttttttgtataatagtttaaaaattgtgatacctgttttctgtctgtaatctgaatcttttc

SEQ ID NO: 1365 - DNA, 161 bp, unidentified
  misc_feature 1..161: note = May be homo sapiens or mus musculus
  source 1..161: mol_type = genomic DNA
gtaagtcattatggaaaagagccccaattatttatataatattctgaacctgtcaatacagtctgtagaaaacatgtagtcatctctgtgtaggagatggagcctgacgtgtgaactcttgccatattttatgcatctttccaatgggaaaggaaccatgc

SEQ ID NO: 1366 - DNA, 160 bp, unidentified
  misc_feature 1..160: note = May be homo sapiens or mus musculus
  source 1..160: mol_type = genomic DNA
gtagggacctctccccggcccagaactgctctaaccctctgctcctctctcttgtcctctctctccatgctcccatccttctgtctctgtttctgtctctcaccttgtctctctctgtctttctgtctctggctgtgatctctctggtctctttttctct

SEQ ID NO: 1367 - DNA, 229 bp, unidentified
  misc_feature 1..229: note = May be homo sapiens or mus musculus
  source 1..229: mol_type = genomic DNA
gtgagtaacactgaataggttggatgaatgaataaacaaccaattcaatagaatacctcaagtatttatttggtaatagttgccttctcatgatttgtataagtagtaagcaagatgcaaaagaaacaaccctttacttgatgagtcaaaacaattatctgcacatacacatatctagcaatattatttcagcagatgtacagtaatatgtttcatattttaagtgtaa

SEQ ID NO: 1368 - DNA, 231 bp, unidentified
  misc_feature 1..231: note = May be homo sapiens or mus musculus
  source 1..231: mol_type = genomic DNA
gtaacaaatatttctacccctacacatgtagtgttttcctcttctactgcttctactactgtggggtgtgagtgtgtgttcctaagtgcatgaaattaacatttcctacttcacacacctaacgtttctcattttctccttaatgtttgaattcattgttcaggctttttcataaagctttcttttcgtaaagtggattgagacctcaaagtgttgtcgttgttgttttat

SEQ ID NO: 1369 - DNA, 176 bp, unidentified
  misc_feature 1..176: note = May be homo sapiens or mus musculus
  source 1..176: mol_type = genomic DNA
gtgagatcagtgtcctctgtttgcaaagcaaaattttctgcagtgatatactgatatgttactaaaaagtggttgattaattttggagtgacatttatgcatccctgtgttgtgcttgttctaatctgtttctaatatattggtttcaatcccaattaattttattaagagaactt

SEQ ID NO: 1370 - DNA, 216 bp, unidentified
  misc_feature 1..216: note = May be homo sapiens or mus musculus
  source 1..216: mol_type = genomic DNA
gtaaaccacaaagctaacaattcatgcactttcatggaattgttctccctctccactcttcctcatggtctgtggtgctgggcactgagcctcttcaatttgtctgtcattatgaccaagcgacataacccatttccattctttccctagggtcatcaggcttttcttacagttcatgggtctacctctgtggtaatgggtctttgtgtgtccttt

SEQ ID NO: 1371 - DNA, 329 bp, unidentified
  misc_feature 1..329: note = May be homo sapiens or mus musculus
  source 1..329: mol_type = genomic DNA
gtaatgggtctttgtgtgtcctttgtatacctctaaacattttacttttttttttttaactttgtaaaaaaaaaaaaaaaaaaaaagggagatgctcttaaacacacacttgtttccactgggtaacagtaagaaatgaggaatttcatttaagccttactgcttcctacaaattgcataatattagattacaccaacatgcaattggccaagtttttaaaaacctgacttgtttttggttgtggaaaacactgttaataaagaagagttatttttgctatgggatggtggctttggagtgttgatttgactgctctgttgactttgaa

SEQ ID NO: 1372 - DNA, 188 bp, unidentified
  misc_feature 1..188: note = May be homo sapiens or mus musculus
  source 1..188: mol_type = genomic DNA
gtgggtgttgcccccgcctgcctttgcctccgccgtggccctgagagtcctgggctctgccccgcccggtcccttgctccccactcagttctggatttggggctgcccctaacccagcccgttgctgctttgcaccttttcctgtcattgggcatcccccagtagtcaccccactccaccgaaaagta

SEQ ID NO: 1373 - DNA, 160 bp, unidentified
  misc_feature 1..160: note = May be homo sapiens or mus musculus
  source 1..160: mol_type = genomic DNA
gtagtgccacctctgctaatttctgcaccacctttttcactttttaatcctctgctttcaaattttgcttaatcaaataaactctttaaagttaatttctttgggggaggtgtgggaaagtgggaaagtgattgagaaatcaacattttgagttatttga

SEQ ID NO: 1374 - DNA, 238 bp, unidentified
  misc_feature 1..238: note = May be homo sapiens or mus musculus
  source 1..238: mol_type = genomic DNA
gtaagtagtttaccaatctattaatccttccgagggcctccagaatcacactccccccaccacggaatgtgcattgtggttgttgagtgctgagaatgctgagatgacgtggacatccctctgccacctgcctgcccactctgccacctggagcccatccctcctgagatcctaatgcattcagcgcagcttgggtttatatatgaggaggcagtattgatctgagaaggactacaaa

SEQ ID NO: 1375 - DNA, 199 bp, unidentified
  misc_feature 1..199: note = May be homo sapiens or mus musculus
  source 1..199: mol_type = genomic DNA
gtaagaaaatctttactttttgctaattagcagatttttttttttttgaactgtaagtgccattaagagtgggagagggccaggcacagtggttcatgcctgtaatcccagcactttgggaggttgtggcacgtggattgcttgagatcaagattttgagaccagcctgggcaacatggcaaaaccccatctctacaaa

SEQ ID NO: 1376 - DNA, 182 bp, unidentified
  misc_feature 1..182: note = May be homo sapiens or mus musculus
  source 1..182: mol_type = genomic DNA
gtgatacttcattcaggggttatttgctaaatatgctgtatactaagtatgctatgtgtagaaaaagaatcatgacagaatttgtgctcttaattgtagcaaacattctaataggtagcaaatttctaagacattggcttctaaaaggaatacaatttctagcagtggagagactactgaca

SEQ ID NO: 1377 - DNA, 190 bp, unidentified
  misc_feature 1..190: note = May be homo sapiens or mus musculus
  source 1..190: mol_type = genomic DNA
gtaaggcctcagcagggacctcatctctaactgcgtggaaacctgatccttaatgtcactgaggagtatgtggttctccagaggtgggcctcacaggagcttctgcggttgtacctccaccgccccttgccacagtctctctggctttctgtggttatatctgagtgcattccttaaaagataaaagagg

SEQ ID NO: 1378 - DNA, 255 bp, unidentified
  misc_feature 1..255: note = May be homo sapiens or mus musculus
  source 1..255: mol_type = genomic DNA
gtaagaccgagacctctccaccgtctttctgtcttgattccggctgccttctcttcttgtaattgtgcttaattcctgatttccctccatgttgaagagtgactgatgaggcacacaggcgtggacctcactgccccagttcccccatgaatgcccagacttcccaccaccccggctttttctctacccagtcatttagctatttcacattacctgagaggccaaggcatggctggctggcacccgggagacttc

SEQ ID NO: 1379 - DNA, 172 bp, unidentified
  misc_feature 1..172: note = May be homo sapiens or mus musculus
  source 1..172: mol_type = genomic DNA
gtgagacagaagtagctgagactccattcctgagatcttcacttaacaactcctgcagcttgtgcagagccttactagaaatactgaaggcagaagtccctggaaaatagggcccataactaattagtaatttgtttttgagtaatttgttaccgttatttgagcacattct

SEQ ID NO: 1380 - DNA, 334 bp, unidentified
  misc_feature 1..334: note = May be homo sapiens or mus musculus
  source 1..334: mol_type = genomic DNA
gtgaggccgggctcaatggttcacacctgtcatcccagtttgagactgaggagggaggatcccttgaaggcgagagatggagaccagcctgggcaacattgctgtagagatgacatcccatctctacaaaaataaaattaacaacctggtatggtggcatagactgttcccagttacttaggaggctcagcggggaggactgtttatgcaaataggaagctgcaatgagccctgatgatcctgctgctgcactccagcctgggcaacacagcaaaaccatctctacgaaaaaaaaagttcccactgactggcaaggaaagccaggaaggggggc

SEQ ID NO: 1381 - DNA, 255 bp, unidentified
  misc_feature 1..255: note = May be homo sapiens or mus musculus
  source 1..255: mol_type = genomic DNA
gtagccccacggcccttcccctgatgcatggacgcccagcctcctcctcccccgctccttcctctgcgcagtgtgctgcagccaggccgcatcttgctgtggtttggaaccttcttgtgtcctgttcaactcagaaaccccacagattcttgcttttctgcaggcttggcctctaggttggctgggttgcagagcagtcttgcttctaggttgtcatgagctgcgtggcttccagagctctggggataggaaaca

SEQ ID NO: 1382 - DNA, 225 bp, unidentified
  misc_feature 1..225: note = May be homo sapiens or mus musculus
  source 1..225: mol_type = genomic DNA
gtgaggagtcaccagccgagccaagcctgctgtccaccccagcccctacctgtgtaacagctcatgtcttcctcttgtgacctgccgagcctttgtgaatcagacagtacaaggccacacgctttctttctggcaggggtgccaaatttcccctcctatttttgcataatctctgtaagccacagattcccagtcccaaaaatacctccctgtccccaggcctta

SEQ ID NO: 1383 - DNA, 218 bp, unidentified
  misc_feature 1..218: note = May be homo sapiens or mus musculus
  source 1..218: mol_type = genomic DNA
gtatttctgaattgtgctgtgtgcatgtgtgtttgaaagctcaaacagcttgtcttcttacagcatcgagttgtttgctttattgttagacacaatattagcagtgtatcctttccgtattccctaccatcgaacccattaagatctaaaatccttgtcaagtatctggctttaaaagttgggagatggtagtttaaaaaaaaaaaaagctcttgcaa

SEQ ID NO: 1384 - DNA, 223 bp, unidentified
  misc_feature 1..223: note = May be homo sapiens or mus musculus
  source 1..223: mol_type = genomic DNA
gtgagtaccgcagcccagcccgagggcagccgctgacactgccttcgcagcggtccccggatggcctgctcctgcctggcccagctgggcccactctgctctgaggatgggccaggcctatgcgcctctctctccactctctctcttttgggcctaggtctccttgcctctctccagatgggagtgcgtgcctgtctgtcaggcctgggccaaggggagaagc

SEQ ID NO: 1385 - DNA, 198 bp, unidentified
  misc_feature 1..198: note = May be homo sapiens or mus musculus
  source 1..198: mol_type = genomic DNA
gtgagtaccgcagcccagcccgagggcagccgctgacactgccttcgcagcggtccccggatggcctgctcctgcctggcccagctgggcccactctgctctgaggatgggccaggcctatgcgcctctctctccactctctctcttttgggcctaggtctccttgcctctctccagatgggagtgcgtgcctgtctg

SEQ ID NO: 1386 - DNA, 250 bp, unidentified
  misc_feature 1..250: note = May be homo sapiens or mus musculus
  source 1..250: mol_type = genomic DNA
gtaagtaccatcttatttaggaggaatcatggccactgtacactgaattctgataacctgtaatgcgaattcacaatcacttctcttagtcatttctttctatgtgataaaataccctccttaactgctgatatcgaagagtcgtctcagtctgtggagggtttcattataaaccagtggagatttgccagacatccttgggaggtgacttcttactctattagctaggaaaattggcacaaagcttcta

SEQ ID NO: 1387 - DNA, 167 bp, unidentified
  misc_feature 1..167: note = May be homo sapiens or mus musculus
  source 1..167: mol_type = genomic DNA
gtggccatttgttttcgtccttggtgtttctgaatgtgcccatgtgcctttccttaccctttttttgggcgtgagtgtgtggttgcatccagctggctttgccttcaacatctcaaaggtgtcttcacttattgtcctttgtgtctgcttggcatatctgtcacatg

SEQ ID NO: 1388 - DNA, 165 bp, unidentified
  misc_feature 1..165: note = May be homo sapiens or mus musculus
  source 1..165: mol_type = genomic DNA
gtgagacggctacctcatctaactggactcactctgtcctgtgactcccattctttcttctctcttaactctgccttcagtttcgcagccacctcctctctctgatcagtcgttgtgttggtagtgaagggtgttcttgtgcagcctttctacctgcttctctgt

SEQ ID NO: 1389 - DNA, 253 bp, unidentified
  misc_feature 1..253: note = May be homo sapiens or mus musculus
  source 1..253: mol_type = genomic DNA
gtaagtcccgtccatgccctgttctcgctggctctgcctccctgcctgcatgtctgacctgtgtgtgcgggcattgggagggggctctgtggatgtgagggtctgtgcgtggggtctggttgttcatttactcacagaagcacagcctatggagccagactcgggggttcaaatggcagctctgccaagtgaccttgagcaagtcactcaaggtctctgggcctggttttcctcttctgtaaaatgggtatag

SEQ ID NO: 1390 - DNA, 334 bp, unidentified
  misc_feature 1..334: note = May be homo sapiens or mus musculus
  source 1..334: mol_type = genomic DNA
gtagggggcgcggggcggggcgtgagcgcatgaacaggctgtgcacgacgcatggatgcccctcctccgagccctgcccctgccttcaccagaacatgccatcatccccatgggggggcgctgcgccaagcttggctctggactgttccattatggcttggcggtggggagggtagaggggatgcgatgtggaagcccagactgttgcatagtcagccttatgcatggaccatttcatcatcgtgggttgtgggggctctaaggggcttcaattctgtagctcaggagagactgagcagccggtgtccctatagtggagggggcgggggctaca

SEQ ID NO: 1391 - DNA, 221 bp, unidentified
  misc_feature 1..221: note = May be homo sapiens or mus musculus
  source 1..221: mol_type = genomic DNA
gtgagtacacgtaggtgctggctgaggagcaaagagttcctttccctgcttgtccgagacactgctaggcggaatgacctgcttttcctcctctactgtccttgtgatcctttcttctttctttcctcttccttagttaccccttgtccccctctgcatgcttgaattttggcaacttcgaatttttatatattagaggaaaaaaacaccacttcactctg

SEQ ID NO: 1392 - DNA, 212 bp, unidentified
  misc_feature 1..212: note = May be homo sapiens or mus musculus
  source 1..212: mol_type = genomic DNA
gtaccggcagtgagtgctgcggaggggcgcagaggcccgcgccctggctggccctgtgcatgcgccttgcgccctgctcccaggtgccactaacccgtaatctggctctgtgtgcagtgctgcccggcagggctgtcgtgtgcgtgttgggtgggaaggcggaggcggcgcggggcgggctggcctctgagcatctggctgcatttagcacg

SEQ ID NO: 1393 - DNA, 195 bp, unidentified
  misc_feature 1..195: note = May be homo sapiens or mus musculus
  source 1..195: mol_type = genomic DNA
gtattgaatagattttttaccttccctgttttataatgaatttgattctttgtgaaactgtcctaattttattttgcttaagtttataatattgtatcacgtagtaaggacaagagttatattttactgtgacacctcatttatccagtatctttagtgaaagaatattctgtgtgatgttctatgtaccctgag

SEQ ID NO: 1394 - DNA, 161 bp, unidentified
  misc_feature 1..161: note = May be homo sapiens or mus musculus
  source 1..161: mol_type = genomic DNA
gtagtaatttctaatctttgcacctccatcactggcaggtggcttccaggccacaacacaagaatcttttgtgacagcagtaatagttggtttgccaggagcacctggcttttctattaaacaaaaaaaagatttgagtcatgagatgaaacaggcagctt

SEQ ID NO: 1395 - DNA, 233 bp, unidentified
  misc_feature 1..233: note = May be homo sapiens or mus musculus
  source 1..233: mol_type = genomic DNA
gtaccaattcacagacgtgtggtctcacgatattaacccaacttaacttaaaaaaaaaaacaacatcctaaagaagaaattcaaagtgcatgcttactgtaaataggctccagggtgtagaagaactcacaatggcaggagtgccggcatgggtgtacactcaccattttcccaaatgcattgtttgaaccaagattgaaaatgtaactgcccagtagaaaaggttactaaca

SEQ ID NO: 1396 - DNA, 212 bp, unidentified
  misc_feature 1..212: note = May be homo sapiens or mus musculus
  source 1..212: mol_type = genomic DNA
gtgtgtattccctttgctgctctctgcatctctgcttccagccccagccagcatgagggcctagggtggcatggtcagggaggggtgaaccccagggtacctgctctgctttcttctcctttttggggggcagaaagcactgctctccctcagccacagggccctgctcgtagatgtgggattctgtctgcctctgagcccacactcctggc

SEQ ID NO: 1397 - DNA, 198 bp, unidentified
  misc_feature 1..198: note = May be homo sapiens or mus musculus
  source 1..198: mol_type = genomic DNA
gtaaggcccccgggcctcgccctgctacaacccaccaatcagttggctcaatcagttccctcactcgccaccatgggcatcccaactgcccccctctgtggcttctgtgtaccagaagttgctcccctgccaaaatgtccagtgatttcctaattgctttcaattaggggaaaagtgaggtgggaagggatgggcttt

SEQ ID NO: 1398 - DNA, 172 bp, unidentified
  misc_feature 1..172: note = May be homo sapiens or mus musculus
  source 1..172: mol_type = genomic DNA
gtgggggagctgctccagggctgagcccaacagcttctgctggcctgtgccacccctggatgcctgcactcttcagaacatgacttacaatgcacacatccctccacctatgtaacagggcacagatctcatgctgagccacagtaggcaggcctgtagctacatcagccag

SEQ ID NO: 1399 - DNA, 290 bp, unidentified
  misc_feature 1..290: note = May be homo sapiens or mus musculus
  source 1..290: mol_type = genomic DNA
gtgggaaatgcactctgcatggatggggaggatcttatcctcttttgtttattctttactaattcttttgttcttggagtgaatgaatgtgctgggcctctaaaaatgtgcttattttgtggggaagcatattttgacatttttctaatttgcggagtatattttgcgtgtctgcttttggcatttagaaagtgcttttaataatttcattaaaatttctgaaatttgagaaaatagttgaaattgtaaattattttttcctttgttttaaaatcatgtaggatgtatgc

SEQ ID NO: 1400 - DNA, 228 bp, unidentified
  misc_feature 1..228: note = May be homo sapiens or mus musculus
  source 1..228: mol_type = genomic DNA
gtatgtaaaccagacagcttcttaaggattttgggtcatctcccagttgctctcttcttaaactatcagcacaagtttgtcatctatcacctagttgtggtttcttttgttgctgcggttgttttttagtggcattgctttattcatcaccttcatttcatctaaacttcttttacctaagtgacaaaggctattcttagtgtatagttggtgaaaactccaaataat

SEQ ID NO: 1401 - DNA, 223 bp, unidentified
  misc_feature 1..223: note = May be homo sapiens or mus musculus
  source 1..223: mol_type = genomic DNA
gtaatggagtagtcctgtggtgtggatcgctggcatctcattgcttctgcctcagtaatgactgtcttaattgtgatgatagcagctcactaactctgcgtttgtggtgtgatgagcagctagtgtagagtagctgaatgctaataattatggttcctgaattaattaaaaagcggatgtttaacttcacccattatttcctcctgcttttcccctttttcaa

SEQ ID NO: 1402 - DNA, 199 bp, unidentified
  misc_feature 1..199: note = May be homo sapiens or mus musculus
  source 1..199: mol_type = genomic DNA
gtgagtattactctttcttgcctgctcgtccactacattctgctcctcaaccccttatttattttccatctctgcctctcatctgcctcagtttggtttcctcctgttcttttctctctctttctttgtattcttttgttttgctgaccccttttgcttactctgtagtctttgccctttttccattcttttgtttgct

SEQ ID NO: 1403 - DNA, 144 bp, unidentified
  misc_feature 1..144: note = May be homo sapiens or mus musculus
  source 1..144: mol_type = genomic DNA
gtaattaggaactggaatttagagtttgggaatgttattttgacaacgaaattacttatgtgaaatcttttcttctactttcccaaaggcatttttaaaaaggcaagttgcatacttctctgattttttttttcctcttaagaa

SEQ ID NO: 1404 - DNA, 256 bp, unidentified
  misc_feature 1..256: note = May be homo sapiens or mus musculus
  source 1..256: mol_type = genomic DNA
gtaaatatttgagtaatgaattatttcgccttccttaaaaaaagacgcagcttcacgcatgtgactataccagcttcatttaatgctgtgtggattgatcattataattcatgacattctatttagtcttgtggtgtgcttttatgttttccatcttcccttagctaaatgctatatggctttaaaaaatacatatgtatttataatttataatggcagattatattaaagtaacttattttcccagaaatgtctg

SEQ ID NO: 1405 - DNA, 150 bp, unidentified
  misc_feature 1..150: note = May be homo sapiens or mus musculus
  source 1..150: mol_type = genomic DNA
gtatgcaatagtcttaatattaatttttcaagttacaagggcttaagattataaaaatttgcttaagaatatatttctatatgatttgggtatatattctcttatgtagggcacaaatcccaatttaaatgaataaaaaattgcctttga

SEQ ID NO: 1406 - DNA, 225 bp, unidentified
  misc_feature 1..225: note = May be homo sapiens or mus musculus
  source 1..225: mol_type = genomic DNA
gtaacttgagtggacctgtggacaccatcaggtcacaagcatgaaaaaaatgtctatgtctgctttctaaatatattatacttacatgtacacatgtgtgcatatacattcaaaatttgcattgcataaattgtttattcaactaataagactactactattaagaaaatgcattcttccttcacagtgtgttagtaacttgtctaattgaactaatgttgtgtc

SEQ ID NO: 1407 - DNA, 206 bp, unidentified
  misc_feature 1..206: note = May be homo sapiens or mus musculus
  source 1..206: mol_type = genomic DNA
gtatgttagcattagcctggaattcaggtccctcactgttttactctctatcttccttcctttcatcctgccatctttcctagcctaaatacaaactacagtgtttattctctaatccagatttggtaggttgaagctatttcttacacagagctatatttcatgtaactgattctaaccaggttttacctgtagcaaacatgtat

SEQ ID NO: 1408 - DNA, 228 bp, unidentified
  misc_feature 1..228: note = May be homo sapiens or mus musculus
  source 1..228: mol_type = genomic DNA
gtatgaaatgaaattgggctttggttagaagctcattgatgaggactacagtagaatttaacctagagattgaaaaaacctgtccttttgattcttcttgagcatttacacagtatgaaaaatgagtcagtaggagacagagacttccataggaaaacctgacgttgtgcctggaagaactcttcttttcagcaaacactaggcttgtaaaatgtataagtaggaact

SEQ ID NO: 1409 - DNA, 249 bp, unidentified
  misc_feature 1..249: note = May be homo sapiens or mus musculus
  source 1..249: mol_type = genomic DNA
gtaggccagtattgcctgtcctgcatgttgtgatcaattgctgaaataatgcagtcttgaagtaaaacattaactaatagtttgcaaagtaggagtgtttggcctgtgtgaacctaaaggtcagagtgtctattctgtctatagtggaccagaggtatacttggagtcctgccattttatgttgtagtcagtatcctcaccttcatctcatgaatgctcctgatcaagaaagagtgagaaaatgaatgt

SEQ ID NO: 1410 - DNA, 167 bp, unidentified
  misc_feature 1..167: note = May be homo sapiens or mus musculus
  source 1..167: mol_type = genomic DNA
gtaaagctggtaaattactgattatctacaccctttcccttttctgtccttccttgactttttccttccacctttcttaaatttttgttatcctttccacaaagattccctccttatgttcatcaaattcacttgtgtctttgtcatagattgtttaaaagggattg

SEQ ID NO: 1411 - DNA, 231 bp, unidentified
  misc_feature 1..231: note = May be homo sapiens or mus musculus
  source 1..231: mol_type = genomic DNA
gtgagtacctaccacctcctcaccatgctgtcttcactctttctgttttcattatttcaagaaaatccagatccaaaccaactcactctccttgcttcaagttttttagcattggcttgtctgttggttctgtctgtgaaacccagtgtgagaagtccagtcactttttatcagcctaaaacaggttagacaattaagccatttgtttgtgataaactcagatttgtctgt

SEQ ID NO: 1412 - DNA, 260 bp, unidentified
  misc_feature 1..260: note = May be homo sapiens or mus musculus
  source 1..260: mol_type = genomic DNA
gtaaattggccagtcccctttctgttgtacctgcaacagataagggctctgctgggtgtattcatttttttgctgtagcttgtacagagtgtgtgggtgttgagctaacagttgtggctcagtattaaccaaaatgttcttgctttaaaggggaaaatgtccttctatggtttgtttgtttgtttctttcccttaaagctatgtttgacttttgtatatgatgaatactataatcacagaaaacaaaaggattatatatt

SEQ ID NO: 1413 - DNA, 223 bp, unidentified
  misc_feature 1..223: note = May be homo sapiens or mus musculus
  source 1..223: mol_type = genomic DNA
gtaggagtgacttaaaacaaattgatggctgctggccccccattcttctccttcttctgcaatatgatttctcttttttgtcattgtgcccatgacatgtccctttctatgatttaaattctgtataacctatctttagtggaccatttctgacccttgtggtatgtgacttttatttttgagtgatgtttttatatctttccccttaaagtgctgtgacctt

SEQ ID NO: 1414 - DNA, 183 bp, unidentified
  misc_feature 1..183: note = May be homo sapiens or mus musculus
  source 1..183: mol_type = genomic DNA
gtttgggttagcatggggtgatgctttgccaactaacaccataaaaatttttccaattttaagaaaagaaggggagaatccctacatctaccctaaagaggatagaaaactgcctactctcctgtattataatactttggtcaagtaatggatctattgaagtatcatccctgaagtatcctc

SEQ ID NO: 1415 - DNA, 205 bp, unidentified
  misc_feature 1..205: note = May be homo sapiens or mus musculus
  source 1..205: mol_type = genomic DNA
gtattcagaaagaatcaacatcatcttgctttaacaagactatacatctcatcaaatattcaaaaaaattaattcgttatctaaaaataggaaagaaaattctaaccattttctaccacacttccttttgggcctaatttatctagaactatggacatacttcttgcaaataaaaatgaatgacatcttgaaagagaaactaatg

SEQ ID NO: 1416 - DNA, 194 bp, unidentified
  misc_feature 1..194: note = May be homo sapiens or mus musculus
  source 1..194: mol_type = genomic DNA
gtaacgactctgtcccatgccggccggcacaagagctccagctccaaggccctggccgcgcgccctgcacgccccgcacgcccagccctgctcgctcccgccccggctcgcgctccactcggggccgcctcggcaaggctggcagctccagcctccacggtgaccgcccgcttcgagccctgtggcctgcgccg

SEQ ID NO: 1417 - DNA, 181 bp, unidentified
  misc_feature 1..181: note = May be homo sapiens or mus musculus
  source 1..181: mol_type = genomic DNA
gtaagtatccggctctgttctggccacagtgtacctaacagtgatagcatggtttcttttcttttcaaaagtccagctcttgctgttttatttttactttcctgaaggcactatcagatttctcttttaaagacaagcatctaaaacatgttctaattgttgtggggtccaatccgccagt

SEQ ID NO: 1418 - DNA, 244 bp, unidentified
  misc_feature 1..244: note = May be homo sapiens or mus musculus
  source 1..244: mol_type = genomic DNA
gtaagctctatggaactttctgcctcattgatccctataaaaggtttgcattttattgttttgtaagacacatttcactctcttttatataaatatatatatataaataaaatattgctgagcagttagggtaacaatgctgtaaagtagatatttcttgaaatctattgaatattcctgatttttgatggagaaacatgtagtttatagattaggtttgccagagttttacattgtttatctg

SEQ ID NO: 1419 - DNA, 237 bp, unidentified
  misc_feature 1..237: note = May be homo sapiens or mus musculus
  source 1..237: mol_type = genomic DNA
gtacggttggattcctcccgctgctgtggtttgccccgcatgcctgtcaatacccatctgcttctgaatgcatccttttgttgtgttctgataaatgcagtgaaggcaccaccaaggcccttagcagtctgactattaaatgcaaattcactagcagcctcccgagagtcctgttctgataaattacgatgaagggtatgtctgagtaaggaacttctgtgcgttacgacgccgagg

SEQ ID NO: 1420 - DNA, 241 bp, unidentified
  misc_feature 1..241: note = May be homo sapiens or mus musculus
  source 1..241: mol_type = genomic DNA
gtgaattggttgtaaaatatacctttggaaatctttgaataattgaatacaattaatgaatggacattaacaataatgcatgtgaacttcaaagatgatgatatcccaaatctgatcaggatcattttttttatttggcttcttaattgaatcagattttacaactgattgaatttacgtgattacacaagtagcttggttataaaggctgtctgttttatatagacataaagaaaacaac

SEQ ID NO: 1421 - DNA, 244 bp, unidentified
  misc_feature 1..244: note = May be homo sapiens or mus musculus
  source 1..244: mol_type = genomic DNA
gtatgtttttatagcttctaaacatgtcagcagggtggctttttaaattgctgcgctaaccctttcattgtgcattaaaggaaaagtttattaaagataagtggaaaaaaatgtagtctagaggaacttaattatattgtcatttgcctgttataaaatctagcaggcaaatgaaataaaataattgctataaaagatttataaactttgtgaggaaagaagaaaagatctcatcgttaagttt

SEQ ID NO: 1422 - DNA, 252 bp, unidentified
  misc_feature 1..252: note = May be homo sapiens or mus musculus
  source 1..252: mol_type = genomic DNA
gtaagtacccctgatatttctcgaggaaatagaaaacccgggtattgtctctaaaatctgcatcaatatattccacggcactgtgtctatctatccctgtgccttttttgaaggctgaagttgaggctcgttgtgcattctttttcgttagattccatgatttccttgtttgttgctaaaagtaactttttagatagtcgtatccgtttgccatcagctattgaaatcactcctgactcgttcctgtcacac

SEQ ID NO: 1423 - DNA, 160 bp, unidentified
  misc_feature 1..160: note = May be homo sapiens or mus musculus
  source 1..160: mol_type = genomic DNA
gtatggctcatcagaactgtattctgttgcccttcactgctgctcggccttactgcgctaacctcattcatggtgcttataaaatcgatacattctgatagccgtttggtgccccaacgggccagcttccttcctgaatgaggcattaggtgcaaatctt

SEQ ID NO: 1424 - DNA, 185 bp, unidentified
  misc_feature 1..185: note = May be homo sapiens or mus musculus
  source 1..185: mol_type = genomic DNA
gtgaagcccatggtgcccaggactccgaggcccatgagtctgacacgccctccaaaaggggcctaatatcactccacattctccatttcctctatcttaaaagtttaggagagctttacagatatttgtatgtctttttattactcccagaactgctatgaggaaaaaaacccatgatagctact

SEQ ID NO: 1425 - DNA, 199 bp, unidentified
  misc_feature 1..199: note = May be homo sapiens or mus musculus
  source 1..199: mol_type = genomic DNA
gtaagtttctcttctgacgttttccttgtctgcctctctgagatactgatcatgttcctggacaggatgagaataaaacctgtgtaactcccatggccatgtatcatggagtttttcattctgacttgttgagaatgaaaacagggaaaccagatataacccccactcctactccaaagtagctaacgggaggaaaaaa

SEQ ID NO: 1426 - DNA, 195 bp, unidentified
  misc_feature 1..195: note = May be homo sapiens or mus musculus
  source 1..195: mol_type = genomic DNA
gtatgtatgtatttaatataatttatggaaccataagatttattagatcaatgatttccaaactgcaagtcaaggtccaatagtgaattgagaaataaatttagtgaatagcaatcagtcttttttgtagaattttaaagatagtaaatattagacttgatttcaagtaatgtataggttttgttgacatttgtt

SEQ ID NO: 1427 - DNA, 239 bp, unidentified
  misc_feature 1..239: note = May be homo sapiens or mus musculus
  source 1..239: mol_type = genomic DNA
gttggcaacctctctctttgcctctcccctctttccttttctctttcctacttttccattcttgcttcagtcatttgttttaaaataacatgcttcatccatcgcgtatggcttaactcatatccagctgagctggtgcttccaaatttaaattctgaaaatttgatgactttggttgtgttacacatgcaggtgttataagtgatcaaacacatgctaacacgttgctcaccgggttc

SEQ ID NO: 1428 - DNA, 261 bp, unidentified
  misc_feature 1..261: note = May be homo sapiens or mus musculus
  source 1..261: mol_type = genomic DNA
gtaagaattgttttctatgtatgtcatatgttctgaaatataatttcaatcaattacacatatgattcttgatgcaaagagatggtttcaaattacctaaaattgtaaaataatatccagattctattaaaaacaaacctcacaatatatgaattttctaatctagatgtaatgtatttgctctttaattttcactgcatgccttattttccaatcatttttaatgaatacttaaaaatatattaaaattctgagtgatct

SEQ ID NO: 1429 - DNA, 225 bp, unidentified
  misc_feature 1..225: note = May be homo sapiens or mus musculus
  source 1..225: mol_type = genomic DNA
gtactgcgcctcccaccaggcgatgtcctcctcctcctccccttccttcatttcttctctctactcctctgcagccagggcggggacatggtctgggggcctcttggggagcaggcaagagttaggctgggcagatggaaccccacttgggcacagcactccttctcttgcagctgacgcacctctcctgccacgctggtttcatgattaactaccttgttcttt

SEQ ID NO: 1430 - DNA, 188 bp, unidentified
  misc_feature 1..188: note = May be homo sapiens or mus musculus
  source 1..188: mol_type = genomic DNA
gtagatgtgtctcgaccagcgtcccgcccgctcccgcccgtccctcctgccagcatgcagccccctgctgcacgcagccgctggccgggctccagagccgccccagaggccgccaggcccccgggagcccctgctcccgtgtggtcacatcccagcagagcccaccacaagggcagggaggcagcccc

SEQ ID NO: 1431 - DNA, 234 bp, unidentified
  misc_feature 1..234: note = May be homo sapiens or mus musculus
  source 1..234: mol_type = genomic DNA
gtacagtgaacctggggcttcccgctcccgctgtgaggctgcactatgcatggctctggggtcagagctgcacagaggtgatgtttttgtgccagactccaaggaatggaagtttggcttggggccctcctgaaggtgcatgcgaggctgacatgagattttggtttggtttcttgattccctggttggttcagataagaatgcttcttaggagaatttgctgtgtggctctaa

SEQ ID NO: 1432 - DNA, 195 bp, unidentified
  misc_feature 1..195: note = May be homo sapiens or mus musculus
  source 1..195: mol_type = genomic DNA
gtaaggagtgggcagtgctagcaaaattcccggggcacttctgtccattatctcaatacctggggttgacatttcctgtctcagatcaggagtcctgactaccctgcctctgaccactcgaactgagtgctgcttagctgtatcgtagacaccgcctgtttgtgaacagacaccctgcttcttgatgataacaca

SEQ ID NO: 1433 - DNA, 246 bp, unidentified
  misc_feature 1..246: note = May be homo sapiens or mus musculus
  source 1..246: mol_type = genomic DNA
gtaactgtgaatgaaggtagccttaacagtgctttcaaatttgctaaatccaagttgggattaagcttctgttcttaaagcttataattaaagctgcctttcctgacatcaagcttccagagcatgaaatgagatgagcatcatttcttaataagctggagcaaaaatgttattaatgatggtagagggtgtgtattggctaaccaaagattgcaaagtcaattatggaatcaagttaataatcag

SEQ ID NO: 1434 - DNA, 172 bp, unidentified
  misc_feature 1..172: note = May be homo sapiens or mus musculus
  source 1..172: mol_type = genomic DNA
gtaagtagctgggaccacaggcggtgcccaggtttttttttttttttttttttttttcgttggtagagacagggtctcactgttgccaggactgctctgaaactcctggtttcaagtgatccccttgcctcctcccacttaggccttccaaatgctgggattacaaggcatg

SEQ ID NO: 1435 - DNA, 225 bp, unidentified
  misc_feature 1..225: note = May be homo sapiens or mus musculus
  source 1..225: mol_type = genomic DNA
gtatccgactaaactgtgctaagagcttaatgcttactctctgtcccaccatagtctattggttagacttaaaattggtagttgaataatttcagaaaggctctccatccgccccttcagttttaatgtatatgttttctctggacctgttgcgtgatctggcagggtgctgagggttggatgtgaggaaggagaggccatgtttctttttctgacttttgactg

SEQ ID NO: 1436 - DNA, 258 bp, unidentified
  misc_feature 1..258: note = May be homo sapiens or mus musculus
  source 1..258: mol_type = genomic DNA
gtgatgatctatgtctgtctagttctaggacttagtaaaatctagcttggctgattaaaaaaactttaattttatcttttaaccaataagcagaagccattgcggcagccttcataagctaaaatactgctctgtgtagactgtattggtagcttatgttttgaatttacattgtagtgtgctgcatattatttggattatattgtatatggtaacaaaataagctctgctttaaagtctttcttgaatttttttccc

SEQ ID NO: 1437 - DNA, 191 bp, unidentified
  misc_feature 1..191: note = May be homo sapiens or mus musculus
  source 1..191: mol_type = genomic DNA
gtaagacccccgtctctactgaaaatacaaaaattagccgggcatagtggcgtgtgcctgtaatcccagtttcttgagatgctgaggcagaggaattgcttgaacccaggaggcggaggttgcagtgagccgggattgcgccactgcactccagcctgggcgacagagcaagacgctgtttcaaaaaaaga

SEQ ID NO: 1438 - DNA, 227 bp, unidentified
  misc_feature 1..227: note = May be homo sapiens or mus musculus
  source 1..227: mol_type = genomic DNA
gtaactactaaatttaccatttttgtggcatggataaaatggagtgctatgcaaatactgttgcacgtgagatgatttctaagtccttgcttgatccgtgaagatcaaatagttaaatactgggcatttgggctttaacccttagcggttgatgcatgatggtgttgattagtgctttgagatgtgtcaacctttcttttttatactaacagcatcattttgaaatt

SEQ ID NO: 1439 - DNA, 168 bp, synthetic construct
  misc_feature 1..168: note = Synthetic
  source 1..168: mol_type = other DNA
gtacgacaggaaagcagtcatctcagcttaccttgctttgtgttaagagcatgacctaggattgccactcattctggttgaaatatcttgccgactcaccttctaacttcccgaatcatttttttcaccttcactcttgaaagataacttcagtagattagggtctta

SEQ ID NO: 1440 - DNA, 181 bp, synthetic construct
  misc_feature 1..181: note = Synthetic
  source 1..181: mol_type = other DNA
gtagggacttctgcatttgtgtgcttgcgattggcagccccacactgtgttgctctgcatggctcgggctggatggcagagtttaaaaaaacaacacgggtacacgttacaaatgtaagagggagggaaagctctgtttgcttattttttggaaatgtatttactgttatttctgtggtgt

SEQ ID NO: 1441 - DNA, 251 bp, synthetic construct; identical to SEQ ID NO: 1331
  misc_feature 1..251: note = Synthetic
  source 1..251: mol_type = other DNA

SEQ ID NO: 1442 - DNA, 194 bp, synthetic construct
  misc_feature 1..194: note = Synthetic
  source 1..194: mol_type = other DNA
gtatacatctgacagtagagtggggctgggatcttggcttgtgggtggatgggggtacaagctatgcatagtggtgtgctttggttttatcctttggaaactagaatctccacccttatctttgaaacattggtgctggttatttgtttggcaaaagctttggaggcatggccgggcgcggtggctcacgcctg

SEQ ID NO: 1443 - DNA, 140 bp, synthetic construct
  misc_feature 1..140: note = Synthetic
  source 1..140: mol_type = other DNA
gtacagaatgtcaagtgtccttaagcagctgatagaattgttttttaatactgctactgtgtaataaggtgcttcccttttcccattcaaaaagagagctaatgcgcttgcagcttacccctcctttccttgcatatggg

SEQ ID NO: 1444 - DNA, 179 bp, synthetic construct
  misc_feature 1..179: note = Synthetic
  source 1..179: mol_type = other DNA
gtacgtactgttttttcactttatggcacggttttaccaattggaaaaaagtaatttttataccccaaaagggtgtaaaacattggtgattatttttgaaaaagggcttttcaaaactgagccatattggaaaaaatcagcacttacccgatcctgtgcaagcaggctctaaacaacac

SEQ ID NO: 1445 - DNA, 209 bp, synthetic construct
  misc_feature 1..209: note = Synthetic
  source 1..209: mol_type = other DNA
gttcgtatgccctctttcttttctctgcacgagtgagtgtgtgtcagagagccgtgtaaccaatggtgtggctttgcattgattctgcttctgttgaagagtcttcctgcttctttctgttctggtcattgcatggctacagagctgtccatgtgtaaaaatggagtatatggaagatcgtaagtgcactcttggtgttggccatgtcg

SEQ ID NO: 1446 - DNA, 217 bp, synthetic construct
  misc_feature 1..217: note = Synthetic
  source 1..217: mol_type = other DNA
gtaggttgcctgagagccgcgagaccctccccactaaaacaggactcaccaacccgccgagaccctgccggtccggctgctgctccgcggccatttaaaccaccactaacccccacgtgtgctcccggtcggtgcacagccacattcccgtgtagcctcggccccatgtaacacggcacctatcacgtgtgtgtgctttccactctgggtggaggct

SEQ ID NO: 1447 - DNA, 246 bp, synthetic construct
  misc_feature 1..246: note = Synthetic
  source 1..246: mol_type = other DNA
gtaggcgccaataggccacttgttcctctttccctccaccccctcagtttttttcttctcccttactcccttttccttaaaaaaattataaaatgaaggttcaaacaaacttcaatgagcaacattttatcatttttctttcttttttaaattatggcaaaacagaagcttgcagaaaaaactgaagatctgataagaatgaggaaggttagccatttttcactttcacaaaactacattgccatt

SEQ ID NO: 1448 - DNA, 224 bp, synthetic construct
  misc_feature 1..224: note = Synthetic
  source 1..224: mol_type = other DNA
gttagttgtctttgtgtgtgtgtgaagccataaaatctaatgttacgtgtgcggtggtgctgtgaggtatgcttctcgtgcaagcggctccctcagccctgctgtggtaaagaccaagtataaattgtcgctaacagggttttctcattagagtcgtgtgcctgagtgtcccctgtgaattataatgcctccagccctcttgctgctcctctgctctgcctgtc

SEQ ID NO: 1449 - DNA, 255 bp, synthetic construct
  misc_feature 1..255: note = Synthetic
  source 1..255: mol_type = other DNA
gtaggtttaatgtaatctttttgtttccctttacttctgcagagcattataaccagtcatatcaggagaagcctgaattactactcatttttcaatgccaactactcactgctttttgttgttgactcttgcagtttcctttaagctcccttctttcagcaatcatttgcaggggaaatgacaatcttaaaatttttctaagtgtgggttcagattgaatcactttgcatgtattaacttgaagggttaatcatg

SEQ ID NO: 1450 - DNA, 198 bp, synthetic construct
  misc_feature 1..198: note = Synthetic
  source 1..198: mol_type = other DNA
gtaggcagcccacgtgtgaccttttgggagtttgtcaaaacctcagtagagaatgaacccccgaggcccaaatgaaataaggcaggatttgatgaggaactgccgagaacgttcccagtgacatatcttcccctcaaaggatggtatatgtgacgttctttccccacgataccaaagtgatgtaaattgtgtgattac

SEQ ID NO: 1451 - DNA, 385 bp, synthetic construct
  misc_feature 1..385: note = Synthetic
  source 1..385: mol_type = other DNA
gtacgcgtttttgtttttgcatttttaaaaaaatcttgaattcaggaaaatacatgcatgacttttggcttggaatggtttggctttttgtggacggcatgaagtggcttgagatcaaagcttgaatttttttttttttttaataaagtcctgaatctgagactgcgttattttcagctccaccaccactcctctcccccacctctcccaataaaacagtctatttggaaagacttcaaaacatttattcatccagccacagtaatattagtggtggtaattttcctgccttctccggaatattttaagccatcgattttatgtttgcattgttaatacgtccttttgggtcctaagaacctctgcctaaagtataaagccgtat

SEQ ID NO: 1452 - DNA, 222 bp, synthetic construct
  misc_feature 1..222: note = Synthetic
  source 1..222: mol_type = other DNA
gtaacgaagaagaaagccaatgaaaaaaataattcaatctgtttctcttttaatcattaagataattcattcattcaaatctgttttcttgtaatcatttcaaggctgaaaatattcacatctctatggatcatgggcgttatttttttgttttggggggtttggttgctttttttctttcctccttctggtaattcttggtcgaaagtaacactttggccc

SEQ ID NO: 1453 - DNA, 130 bp, synthetic construct
  misc_feature 1..130: note = Synthetic
  source 1..130: mol_type = other DNA
gtacggagctgtaggctttggattggtgtgtaagaaatatgcgtggcccgcatgtcttagaaatgtaattaaaggaacgatttagttatagtccacttttttggggggatgtggttttgtggagtaacat

SEQ ID NO: 1454 - DNA, 227 bp, synthetic construct
  misc_feature 1..227: note = Synthetic
  source 1..227: mol_type = other DNA
gtaagcgacagatacagatgcatgcggcacccggtgcaaaggtgccgaacagcagatgcatcctaaagtcttgaatgtctgtcgtttgtttgacaaacaagtcaatgccgtgagttgttccagaatgcgtggcattttgttttgtcatagcacaaggtgctgataaccacatgctggcgtgcgtgggaaaacattttgtctctctgcatatgttatgtgttagaact

SEQ ID NO: 1455 - DNA, 211 bp, synthetic construct
  misc_feature 1..211: note = Synthetic
  source 1..211: mol_type = other DNA
gtaagagactttcctgtccatcacacccgtgcctccctgcccagccccgctgccttgcccgcatccagccgtgggacagactagcagttgagtgcagagattggccgggggtctgcaggccctgtgatcatgggtgctgccggccgggcaatgtcacgttcaggcctcacgcgtagccgacgctgtcttcccggggtgcgcggtcagtggt

SEQ ID NO: 1456 - DNA, 249 bp, synthetic construct
  misc_feature 1..249: note = Synthetic
  source 1..249: mol_type = other DNA
gtatgtttctgctattttccacctgtttccatgcagcaacccatggcaaagagtactgagaaaattccatttggtttccttgttttcccctttaccaattcctagataattcactaaaaggaatcctgagcctgagattcttcctccattttcactttaaggttagcagagattccagggaaaaagtggaaactgaaacaatgaccaaatggccactttttctttatgtaaggggttggcctcacatga

SEQ ID NO: 1457 - DNA, 194 bp, synthetic construct
  misc_feature 1..194: note = Synthetic
  source 1..194: mol_type = other DNA
gtacgaaaggttttctaatgtttactaatcactaggtcctttatatgtgcctttgtttctgattctcatgtacttgtctctcactacttcttaagggctcacctgtatctattttatctttgtgttcctgtaataataggtagggctttagacatagtagccagttagtctgttgactggattttctcattagc

SEQ ID NO: 1458 - DNA, 260 bp, synthetic construct
  misc_feature 1..260: note = Synthetic
  source 1..260: mol_type = other DNA
gtaagccaattaatggttctgcatgacctagccactgctgggggttttcttctataacgttgtccttgtgaaaacttttgtgaaattaaaaaaaaaggagttacaaattttattctgttattggtttgtttatttttatttatattgttctgtttgtggttttatttattttgttttgcttttccccccctcccctttccctctccttttcccttccttcttctcttccttccttcttccactttctaaattgctcagcg

SEQ ID NO: 1459 - DNA, 244 bp, synthetic construct
  misc_feature 1..244: note = Synthetic
  source 1..244: mol_type = other DNA
gtgagcttcacacattcttcccatgtctgttcagaaaagaaacctattcagatataagttaagctaatttagtaatcctagaattgtcctctgagagatttagatggatgggccacttcacagtagcagccaactcacgggagcacctgggcaacgctagtggacttttttgtagtgagtgtgttgatcatagaaaatgtagatataaggaaataaactttgaggatagagaattaacattatt

SEQ ID NO: 1460 - DNA, 219 bp, synthetic construct
  misc_feature 1..219: note = Synthetic
  source 1..219: mol_type = other DNA
gtaggccctagtttttctcatgccatcagttccttttcaagctgtgctttgttttcttctttgttctatggtttttgatgtagttgaggtgacggatggtgatgctggctattttaggctgcatggctttctgactactgttttagactccttcccccacacctacccagttcatttttgcttggttttcttttgagcttggcatcttccttaaagggg

SEQ ID NO: 1461 - DNA, 203 bp, synthetic construct
  misc_feature 1..203: note = Synthetic
  source 1..203: mol_type = other DNA
gtaggtccgctgtgcctcctccgttggactgtgtgtgctctctagccttggttagtgtgagtgtgttgtgggtttgtttgtttgtttgtttgttttcttaaatcacttttgaaaaaacttgatgcttttttttttttggttaggtaataaaactatgtaacaaattctctaagacatatactaatgtttagaggtttttaaag

SEQ ID NO: 1462 - DNA, 237 bp, synthetic construct
  misc_feature 1..237: note = Synthetic
  source 1..237: mol_type = other DNA
gtacgataaacttagacagcatatctgttgtccgagctttaaattaattcttatagttccattgtaggcataagatttgggcttttagattttattttcatagtcatttttggctggtgaaaattttatttcactcatttgcatgatgtgctatgttaaaataactaaatcctttctaattcattaatctatttttaagtgtgatgcctgtgtgctttaataacactaaaataggta

SEQ ID NO: 1463 - DNA, 223 bp, synthetic construct
  misc_feature 1..223: note = Synthetic
  source 1..223: mol_type = other DNA
gtaggcccttgggtcggtcgattttctctaactgtgagcggatcatggcatggttttcctttcttcttttcttctaacacgcactttgagctgaatcgttgcatgtttaggaggcattccgtctcacttcctcagcttgcttccttacttcctctgtgtatgtgaatgtctgtgtgcgttttcctgagagccagcgaatgtggggaggaactgaggacagagg

SEQ ID NO: 1464 - DNA, 227 bp, synthetic construct
  misc_feature 1..227: note = Synthetic
  source 1..227: mol_type = other DNA
gtgaggctgtttttaaaattctaattcttacaatataggcatcataatattggggaaataattctataagaagggaaaaaatggggttaaggctgggtgtggtggtgtgtgcatgtagtcccagctactcaggaagctgaagtagaggctcacttgagctcaggagttggaggctgaaatgtactgtgattgcaccactgcactccagcctgggcaacataatgaga

SEQ ID NO: 1465 - DNA, 209 bp, synthetic construct
  misc_feature 1..209: note = Synthetic
  source 1..209: mol_type = other DNA
gtaaatatcacattactgtttatctactttctcagcactgctgagaggcaaggcaagcctgggaaaaagagaaatgtagtcttcaagggaaatcatgtttcaagtagactgacctcataaatatactataattttttaaggtttgaaaagatgtcgagtcttgtcatttctgttgtgagttcagtacccaatggatgcaagctgagatg

SEQ ID NO: 1466 - DNA, 185 bp, synthetic construct
  misc_feature 1..185: note = Synthetic
  source 1..185: mol_type = other DNA
gtaaatgtcctgaacaatttgctttccctattccctgcatgttcccagatgttctcatgctccacttgacctgcacaaacatcttgagcctggcttggctggaataaaaatttgtaagatattttacaccagtgctggattcaattttgtttttgtgttagagcacacaacacggcagaacaggc

SEQ ID NO: 1467 - DNA, 204 bp, synthetic construct
  misc_feature 1..204: note = Synthetic
  source 1..204: mol_type = other DNA
gtagggctctcaacttttcagacttgtggttttcctttccctttttccctcttcccttgttcctcctgcctttctcatttcctgggatgctagctttaaaatctctggaatggcatgggggtaggagcagtggaatttctgctgtgctctactcctcaaagtcctgaaggctgcctttaccactgcttgtttcccacaaacctg

SEQ ID NO: 1468 - DNA, 228 bp, synthetic construct
  misc_feature 1..228: note = Synthetic
  source 1..228: mol_type = other DNA
gtaagcagagagcaccacaacccctagagatggctcagaggcacagcaggagtcatcggagctgcagtgccagactaggggtgtggaccatgaaagccagtgcagtttttggggaatttaaaatatatatagacacaagctctccgtacccattaagatcattttgttgttacaattgatcataaagaggttagtgtgtcctctttttttaaggaaaaaaatgtattt

SEQ ID NO: 1469 - DNA, 261 bp, synthetic construct; identical to SEQ ID NO: 1359
  misc_feature 1..261: note = Synthetic
  source 1..261: mol_type = other DNA

SEQ ID NO: 1470 - DNA, 240 bp, synthetic construct
  misc_feature 1..240: note = Synthetic
  source 1..240: mol_type = other DNA
gtagggtacccattccaggtgaggtggagagtgagaatgcctttgtttccctaccctaaccctccccttcaccagcactcagccagggacccactactgcctgcgttcctgcatctccctctgaggaaaaagaagctgcttgttggaataatccacaagtactttggaccccaaatccttaaaattaaagacattagctcacctagatttgaaatattgagcacactaatttctcagcaa

SEQ ID NO: 1471 - DNA, 231 bp, synthetic construct
  misc_feature 1..231: note = Synthetic
  source 1..231: mol_type = other DNA
gtgagttttcatatggttttggcatatgaagcttatgactgtcataagccataccaagcctgtggagtatggcatgattttcattacataatccaatgaaaatagacttattttaaatccctaactttgtagttttaatttgtatttcactatcttgaaattaacagctagtacttatccatcacagcagtctcctactgacatgaagcaagttgttgaatgcagtagagc

SEQ ID NO: 1472 - DNA, 222 bp, synthetic construct
  misc_feature 1..222: note = Synthetic
  source 1..222: mol_type = other DNA
gtaacggttttcactatttaatgaagcagacccatgcatgtgaagggtggacacctcaggtgacatgctttatagttggcctgagccttgacccagtggttcaacctgagtttggtcttggtaccattcaggtgtttgtgagctgagactgatgagtaggaacaggtgttttatatctcgtcttttgtcaaaagtaaagactcattcctttggtaacccaac

SEQ ID NO: 1473 - DNA, 224 bp, synthetic construct
  misc_feature 1..224: note = Synthetic
  source 1..224: mol_type = other DNA
gtaagatccacaagtcagtgcagatgttagcgctggcctaatcggaatgagctgcgtgtctccttatccctaaagtctgcagtagaagcatgctgtcttttgagctacttattacttctccctcttcctgcatggccccattgctttatgtctgattacctcggaaagtcatcttggcagcagctgaaactacacagaccataccttttattagagttcccacc

SEQ ID NO: 1474 - DNA, 255 bp, synthetic construct
  misc_feature 1..255: note = Synthetic
  source 1..255: mol_type = other DNA
gtacggtctttcctgcctttcctacattctggaatttcattgatgttctaaagtgccttcctagaaattctaagcaagtctcatttttgttgcatgcatcacttgttgtaaatcatataaatgcactaatatttctaaacatgataattttaatacatttttgtggtcataccttttagataaagtagtggttttttttgtataatagtttaaaaattgtgatacctgttttctgtctgtaatctgaatcttttc

SEQ ID NO: 1475 - DNA, 161 bp, synthetic construct
  misc_feature 1..161: note = Synthetic
  source 1..161: mol_type = other DNA
gtacggcattatggaaaagagccccaattatttatataatattctgaacctgtcaatacagtctgtagaaaacatgtagtcatctctgtgtaggagatggagcctgacgtgtgaactcttgccatattttatgcatctttccaatgggaaaggaaccatgc

SEQ ID NO: 1476 - DNA, 160 bp, synthetic construct
  misc_feature 1..160: note = Synthetic
  source 1..160: mol_type = other DNA
gtacatacctctccccggcccagaactgctctaaccctctgctcctctctcttgtcctctctctccatgctcccatccttctgtctctgtttctgtctctcaccttgtctctctctgtctttctgtctctggctgtgatctctctggtctctttttctct

SEQ ID NO: 1477 - DNA, 229 bp, synthetic construct
  misc_feature 1..229: note = Synthetic
  source 1..229: mol_type = other DNA
gtatgtaacactgaataggttggatgaatgaataaacaaccaattcaatagaatacctcaagtatttatttggtaatagttgccttctcatgatttgtataagtagtaagcaagatgcaaaagaaacaaccctttacttgatgagtcaaaacaattatctgcacatacacatatctagcaatattatttcagcagatgtacagtaatatgtttcatattttaagtgtaa

SEQ ID NO: 1478 - DNA, 231 bp, synthetic construct
  misc_feature 1..231: note = Synthetic
  source 1..231: mol_type = other DNA
gtattgaatatttctacccctacacatgtagtgttttcctcttctactgcttctactactgtggggtgtgagtgtgtgttcctaagtgcatgaaattaacatttcctacttcacacacctaacgtttctcattttctccttaatgtttgaattcattgttcaggctttttcataaagctttcttttcgtaaagtggattgagacctcaaagtgttgtcgttgttgttttat

SEQ ID NO: 1479 - DNA, 176 bp, synthetic construct
  misc_feature 1..176: note = Synthetic
  source 1..176: mol_type = other DNA
gtaagctcagtgtcctctgtttgcaaagcaaaattttctgcagtgatatactgatatgttactaaaaagtggttgattaattttggagtgacatttatgcatccctgtgttgtgcttgttctaatctgtttctaatatattggtttcaatcccaattaattttattaagagaactt

SEQ ID NO: 1480 - DNA, 216 bp, synthetic construct
  misc_feature 1..216: note = Synthetic
  source 1..216: mol_type = other DNA
gtacggcacaaagctaacaattcatgcactttcatggaattgttctccctctccactcttcctcatggtctgtggtgctgggcactgagcctcttcaatttgtctgtcattatgaccaagcgacataacccatttccattctttccctagggtcatcaggcttttcttacagttcatgggtctacctctgtggtaatgggtctttgtgtgtccttt

SEQ ID NO: 1481 - DNA, 329 bp, synthetic construct
  misc_feature 1..329: note = Synthetic
  source 1..329: mol_type = other DNA
gtacatggtctttgtgtgtcctttgtatacctctaaacattttacttttttttttttaactttgtaaaaaaaaaaaaaaaaaaaaagggagatgctcttaaacacacacttgtttccactgggtaacagtaagaaatgaggaatttcatttaagccttactgcttcctacaaattgcataatattagattacaccaacatgcaattggccaagtttttaaaaacctgacttgtttttggttgtggaaaacactgttaataaagaagagttatttttgctatgggatggtggctttggagtgttgatttgactgctctgttgactttgaa

SEQ ID NO: 1482 - DNA, 188 bp, synthetic construct; identical to SEQ ID NO: 1372
  misc_feature 1..188: note = Synthetic
  source 1..188: mol_type = other DNA

SEQ ID NO: 1483 - DNA, 160 bp, synthetic construct
  misc_feature 1..160: note = Synthetic
  source 1..160: mol_type = other DNA
gttcgtccacctctgctaatttctgcaccacctttttcactttttaatcctctgctttcaaattttgcttaatcaaataaactctttaaagttaatttctttgggggaggtgtgggaaagtgggaaagtgattgagaaatcaacattttgagttatttga

SEQ ID NO: 1484 - DNA, 238 bp, synthetic construct
  misc_feature 1..238: note = Synthetic
  source 1..238: mol_type = other DNA
gtacgaagtttaccaatctattaatccttccgagggcctccagaatcacactccccccaccacggaatgtgcattgtggttgttgagtgctgagaatgctgagatgacgtggacatccctctgccacctgcctgcccactctgccacctggagcccatccctcctgagatcctaatgcattcagcgcagcttgggtttatatatgaggaggcagtattgatctgagaaggactacaaa

SEQ ID NO: 1485 - DNA, 199 bp, synthetic construct
  misc_feature 1..199: note = Synthetic
  source 1..199: mol_type = other DNA
gtagggaaatctttactttttgctaattagcagatttttttttttttgaactgtaagtgccattaagagtgggagagggccaggcacagtggttcatgcctgtaatcccagcactttgggaggttgtggcacgtggattgcttgagatcaagattttgagaccagcctgggcaacatggcaaaaccccatctctacaaa

SEQ ID NO: 1486 - DNA, 182 bp, synthetic construct
  misc_feature 1..182: note = Synthetic
  source 1..182: mol_type = other DNA
gtactgcttcattcaggggttatttgctaaatatgctgtatactaagtatgctatgtgtagaaaaagaatcatgacagaatttgtgctcttaattgtagcaaacattctaataggtagcaaatttctaagacattggcttctaaaaggaatacaatttctagcagtggagagactactgaca

SEQ ID NO: 1487 - DNA, 190 bp, synthetic construct
  misc_feature 1..190: note = Synthetic
  source 1..190: mol_type = other DNA
gtaagccctcagcagggacctcatctctaactgcgtggaaacctgatccttaatgtcactgaggagtatgtggttctccagaggtgggcctcacaggagcttctgcggttgtacctccaccgccccttgccacagtctctctggctttctgtggttatatctgagtgcattccttaaaagataaaagagg

SEQ ID NO: 1488 - DNA, 255 bp, synthetic construct
  misc_feature 1..255: note = Synthetic
  source 1..255: mol_type = other DNA
gtaagcccgagacctctccaccgtctttctgtcttgattccggctgccttctcttcttgtaattgtgcttaattcctgatttccctccatgttgaagagtgactgatgaggcacacaggcgtggacctcactgccccagttcccccatgaatgcccagacttcccaccaccccggctttttctctacccagtcatttagctatttcacattacctgagaggccaaggcatggctggctggcacccgggagacttc

SEQ ID NO: 1489 - DNA, 172 bp, synthetic construct
  misc_feature 1..172: note = Synthetic
  source 1..172: mol_type = other DNA
gtaggtcagaagtagctgagactccattcctgagatcttcacttaacaactcctgcagcttgtgcagagccttactagaaatactgaaggcagaagtccctggaaaatagggcccataactaattagtaatttgtttttgagtaatttgttaccgttatttgagcacattct

SEQ ID NO: 1490 - DNA, 334 bp, synthetic construct
  misc_feature 1..334: note = Synthetic
  source 1..334: mol_type = other DNA
gtaagcccgggctcaatggttcacacctgtcatcccagtttgagactgaggagggaggatcccttgaaggcgagagatggagaccagcctgggcaacattgctgtagagatgacatcccatctctacaaaaataaaattaacaacctggtatggtggcatagactgttcccagttacttaggaggctcagcggggaggactgtttatgcaaataggaagctgcaatgagccctgatgatcctgctgctgcactccagcctgggcaacacagcaaaaccatctctacgaaaaaaaaagttcccactgactggcaaggaaagccaggaaggggggc

SEQ ID NO: 1491 - DNA, 255 bp, synthetic construct
  misc_feature 1..255: note = Synthetic
  source 1..255: mol_type = other DNA
gtatgcccacggcccttcccctgatgcatggacgcccagcctcctcctcccccgctccttcctctgcgcagtgtgctgcagccaggccgcatcttgctgtggtttggaaccttcttgtgtcctgttcaactcagaaaccccacagattcttgcttttctgcaggcttggcctctaggttggctgggttgcagagcagtcttgcttctaggttgtcatgagctgcgtggcttccagagctctggggataggaaaca

SEQ ID NO: 1492 - DNA, 225 bp, synthetic construct; identical to SEQ ID NO: 1382
  misc_feature 1..225: note = Synthetic
  source 1..225: mol_type = other DNA

SEQ ID NO: 1493 - DNA, 218 bp, synthetic construct
  misc_feature 1..218: note = Synthetic
  source 1..218: mol_type = other DNA
gttaggctgaattgtgctgtgtgcatgtgtgtttgaaagctcaaacagcttgtcttcttacagcatcgagttgtttgctttattgttagacacaatattagcagtgtatcctttccgtattccctaccatcgaacccattaagatctaaaatccttgtcaagtatctggctttaaaagttgggagatggtagtttaaaaaaaaaaaaagctcttgcaa

SEQ ID NO: 1494 - DNA, 223 bp, synthetic construct
  misc_feature 1..223: note = Synthetic
  source 1..223: mol_type = other DNA
gtaagtaccgcagcccagcccgagggcagccgctgacactgccttcgcagcggtccccggatggcctgctcctgcctggcccagctgggcccactctgctctgaggatgggccaggcctatgcgcctctctctccactctctctcttttgggcctaggtctccttgcctctctccagatgggagtgcgtgcctgtctgtcaggcctgggccaaggggagaagc

SEQ ID NO: 1495 - DNA, 198 bp, synthetic construct
  misc_feature 1..198: note = Synthetic
  source 1..198: mol_type = other DNA
gtaagtaccgcagcccagcccgagggcagccgctgacactgccttcgcagcggtccccggatggcctgctcctgcctggcccagctgggcccactctgctctgaggatgggccaggcctatgcgcctctctctccactctctctcttttgggcctaggtctccttgcctctctccagatgggagtgcgtgcctgtctg

SEQ ID NO: 1496 - DNA, 250 bp, synthetic construct
  misc_feature 1..250: note = Synthetic
  source 1..250: mol_type = other DNA
gtgagtaccatcttatttaggaggaatcatggccactgtacactgaattctgataacctgtaatgcgaattcacaatcacttctcttagtcatttctttctatgtgataaaataccctccttaactgctgatatcgaagagtcgtctcagtctgtggagggtttcattataaaccagtggagatttgccagacatccttgggaggtgacttcttactctattagctaggaaaattggcacaaagcttcta

SEQ ID NO: 1497 - DNA, 167 bp, synthetic construct
  misc_feature 1..167: note = Synthetic
  source 1..167: mol_type = other DNA
gtacagatttgttttcgtccttggtgtttctgaatgtgcccatgtgcctttccttaccctttttttgggcgtgagtgtgtggttgcatccagctggctttgccttcaacatctcaaaggtgtcttcacttattgtcctttgtgtctgcttggcatatctgtcacatg

SEQ ID NO: 1498 - DNA, 165 bp, synthetic construct
  misc_feature 1..165: note = Synthetic
  source 1..165: mol_type = other DNA
gtgaggcggctacctcatctaactggactcactctgtcctgtgactcccattctttcttctctcttaactctgccttcagtttcgcagccacctcctctctctgatcagtcgttgtgttggtagtgaagggtgttcttgtgcagcctttctacctgcttctctgt

SEQ ID NO: 1499 - DNA, 253 bp, synthetic construct
  misc_feature 1..253: note = Synthetic
  source 1..253: mol_type = other DNA
gtaagccccgtccatgccctgttctcgctggctctgcctccctgcctgcatgtctgacctgtgtgtgcgggcattgggagggggctctgtggatgtgagggtctgtgcgtggggtctggttgttcatttactcacagaagcacagcctatggagccagactcgggggttcaaatggcagctctgccaagtgaccttgagcaagtcactcaaggtctctgggcctggttttcctcttctgtaaaatgggtatag

SEQ ID NO: 1500 - DNA, 334 bp, synthetic construct
  misc_feature 1..334: note = Synthetic
  source 1..334: mol_type = other DNA
gtaagaggcgcggggcggggcgtgagcgcatgaacaggctgtgcacgacgcatggatgcccctcctccgagccctgcccctgccttcaccagaacatgccatcatccccatgggggggcgctgcgccaagcttggctctggactgttccattatggcttggcggtggggagggtagaggggatgcgatgtggaagcccagactgttgcatagtcagccttatgcatggaccatttcatcatcgtgggttgtgggggctctaaggggcttcaattctgtagctcaggagagactgagcagccggtgtccctatagtggagggggcgggggctaca

SEQ ID NO: 1501 - DNA, 221 bp, synthetic construct
  misc_feature 1..221: note = Synthetic
  source 1..221: mol_type = other DNA
gtaagcacacgtaggtgctggctgaggagcaaagagttcctttccctgcttgtccgagacactgctaggcggaatgacctgcttttcctcctctactgtccttgtgatcctttcttctttctttcctcttccttagttaccccttgtccccctctgcatgcttgaattttggcaacttcgaatttttatatattagaggaaaaaaacaccacttcactctg

SEQ ID NO: 1502 - DNA, 212 bp, synthetic construct
  misc_feature 1..212: note = Synthetic
  source 1..212: mol_type = other DNA
gtgagtgcagtgagtgctgcggaggggcgcagaggcccgcgccctggctggccctgtgcatgcgccttgcgccctgctcccaggtgccactaacccgtaatctggctctgtgtgcagtgctgcccggcagggctgtcgtgtgcgtgttgggtgggaaggcggaggcggcgcggggcgggctggcctctgagcatctggctgcatttagcacg

SEQ ID NO: 1503 - DNA, 195 bp, synthetic construct
  misc_feature 1..195: note = Synthetic
  source 1..195: mol_type = other DNA
gttcgcaatagattttttaccttccctgttttataatgaatttgattctttgtgaaactgtcctaattttattttgcttaagtttataatattgtatcacgtagtaaggacaagagttatattttactgtgacacctcatttatccagtatctttagtgaaagaatattctgtgtgatgttctatgtaccctgag

SEQ ID NO: 1504 - DNA, 161 bp, synthetic construct
  misc_feature 1..161: note = Synthetic
  source 1..161: mol_type = other DNA
gtgcggatttctaatctttgcacctccatcactggcaggtggcttccaggccacaacacaagaatcttttgtgacagcagtaatagttggtttgccaggagcacctggcttttctattaaacaaaaaaaagatttgagtcatgagatgaaacaggcagctt

SEQ ID NO: 1505 - DNA, 233 bp, synthetic construct
  misc_feature 1..233: note = Synthetic
  source 1..233: mol_type = other DNA
gtacgaattcacagacgtgtggtctcacgatattaacccaacttaacttaaaaaaaaaaacaacatcctaaagaagaaattcaaagtgcatgcttactgtaaataggctccagggtgtagaagaactcacaatggcaggagtgccggcatgggtgtacactcaccattttcccaaatgcattgtttgaaccaagattgaaaatgtaactgcccagtagaaaaggttactaaca

SEQ ID NO: 1506 - DNA, 212 bp, synthetic construct
  misc_feature 1..212: note = Synthetic
  source 1..212: mol_type = other DNA
gttcggattccctttgctgctctctgcatctctgcttccagccccagccagcatgagggcctagggtggcatggtcagggaggggtgaaccccagggtacctgctctgctttcttctcctttttggggggcagaaagcactgctctccctcagccacagggccctgctcgtagatgtgggattctgtctgcctctgagcccacactcctggc

SEQ ID NO: 1507 - DNA, 198 bp, synthetic construct
  misc_feature 1..198: note = Synthetic
  source 1..198: mol_type = other DNA
gtaggccccccgggcctcgccctgctacaacccaccaatcagttggctcaatcagttccctcactcgccaccatgggcatcccaactgcccccctctgtggcttctgtgtaccagaagttgctcccctgccaaaatgtccagtgatttcctaattgctttcaattaggggaaaagtgaggtgggaagggatgggcttt

SEQ ID NO: 1508 - DNA, 172 bp, synthetic construct
  misc_feature 1..172: note = Synthetic
  source 1..172: mol_type = other DNA
gtaggggagctgctccagggctgagcccaacagcttctgctggcctgtgccacccctggatgcctgcactcttcagaacatgacttacaatgcacacatccctccacctatgtaacagggcacagatctcatgctgagccacagtaggcaggcctgtagctacatcagccag

SEQ ID NO: 1509 - DNA, 290 bp, synthetic construct
  misc_feature 1..290: note = Synthetic
  source 1..290: mol_type = other DNA
gtacccaatgcactctgcatggatggggaggatcttatcctcttttgtttattctttactaattcttttgttcttggagtgaatgaatgtgctgggcctctaaaaatgtgcttattttgtggggaagcatattttgacatttttctaatttgcggagtatattttgcgtgtctgcttttggcatttagaaagtgcttttaataatttcattaaaatttctgaaatttgagaaaatagttgaaattgtaaattattttttcctttgttttaaaatcatgtaggatgtatgc

SEQ ID NO: 1510 - DNA, 228 bp, synthetic construct
  misc_feature 1..228: note = Synthetic
  source 1..228: mol_type = other DNA
gtaaaaaaaccagacagcttcttaaggattttgggtcatctcccagttgctctcttcttaaactatcagcacaagtttgtcatctatcacctagttgtggtttcttttgttgctgcggttgttttttagtggcattgctttattcatcaccttcatttcatctaaacttcttttacctaagtgacaaaggctattcttagtgtatagttggtgaaaactccaaataat

SEQ ID NO: 1511 - DNA, 223 bp, synthetic construct
  misc_feature 1..223: note = Synthetic
  source 1..223: mol_type = other DNA
gtaacggagtagtcctgtggtgtggatcgctggcatctcattgcttctgcctcagtaatgactgtcttaattgtgatgatagcagctcactaactctgcgtttgtggtgtgatgagcagctagtgtagagtagctgaatgctaataattatggttcctgaattaattaaaaagcggatgtttaacttcacccattatttcctcctgcttttcccctttttcaa

SEQ ID NO: 1512 - DNA, 199 bp, synthetic construct
  misc_feature 1..199: note = Synthetic
  source 1..199: mol_type = other DNA
gtaagcattactctttcttgcctgctcgtccactacattctgctcctcaaccccttatttattttccatctctgcctctcatctgcctcagtttggtttcctcctgttcttttctctctctttctttgtattcttttgttttgctgaccccttttgcttactctgtagtctttgccctttttccattcttttgtttgct

SEQ ID NO: 1513 - DNA, 144 bp, synthetic construct
  misc_feature 1..144: note = Synthetic
  source 1..144: mol_type = other DNA
gtacgcaggaactggaatttagagtttgggaatgttattttgacaacgaaattacttatgtgaaatcttttcttctactttcccaaaggcatttttaaaaaggcaagttgcatacttctctgattttttttttcctcttaagaa

SEQ ID NO: 1514 - DNA, 256 bp, synthetic construct
  misc_feature 1..256: note = Synthetic
  source 1..256: mol_type = other DNA
gtaggtatttgagtaatgaattatttcgccttccttaaaaaaagacgcagcttcacgcatgtgactataccagcttcatttaatgctgtgtggattgatcattataattcatgacattctatttagtcttgtggtgtgcttttatgttttccatcttcccttagctaaatgctatatggctttaaaaaatacatatgtatttataatttataatggcagattatattaaagtaacttattttcccagaaatgtctg

SEQ ID NO: 1515 - DNA, 150 bp, synthetic construct
  misc_feature 1..150: note = Synthetic
  source 1..150: mol_type = other DNA
gtaaggaatagtcttaatattaatttttcaagttacaagggcttaagattataaaaatttgcttaagaatatatttctatatgatttgggtatatattctcttatgtagggcacaaatcccaatttaaatgaataaaaaattgcctttga

SEQ ID NO: 1516 - DNA, 225 bp, synthetic construct
  misc_feature 1..225: note = Synthetic
  source 1..225: mol_type = other DNA
gtaggttgagtggacctgtggacaccatcaggtcacaagcatgaaaaaaatgtctatgtctgctttctaaatatattatacttacatgtacacatgtgtgcatatacattcaaaatttgcattgcataaattgtttattcaactaataagactactactattaagaaaatgcattcttccttcacagtgtgttagtaacttgtctaattgaactaatgttgtgtc

SEQ ID NO: 1517 - DNA, 206 bp, synthetic construct
  misc_feature 1..206: note = Synthetic
  source 1..206: mol_type = other DNA
gtacgttagcattagcctggaattcaggtccctcactgttttactctctatcttccttcctttcatcctgccatctttcctagcctaaatacaaactacagtgtttattctctaatccagatttggtaggttgaagctatttcttacacagagctatatttcatgtaactgattctaaccaggttttacctgtagcaaacatgtat

SEQ ID NO: 1518 - DNA, 228 bp, synthetic construct
  misc_feature 1..228: note = Synthetic
  source 1..228: mol_type = other DNA
gtaaagaatgaaattgggctttggttagaagctcattgatgaggactacagtagaatttaacctagagattgaaaaaacctgtccttttgattcttcttgagcatttacacagtatgaaaaatgagtcagtaggagacagagacttccataggaaaacctgacgttgtgcctggaagaactcttcttttcagcaaacactaggcttgtaaaatgtataagtaggaact

SEQ ID NO: 1519 - DNA, 249 bp, synthetic construct
  misc_feature 1..249: note = Synthetic
  source 1..249: mol_type = other DNA
gttagtcagtattgcctgtcctgcatgttgtgatcaattgctgaaataatgcagtcttgaagtaaaacattaactaatagtttgcaaagtaggagtgtttggcctgtgtgaacctaaaggtcagagtgtctattctgtctatagtggaccagaggtatacttggagtcctgccattttatgttgtagtcagtatcctcaccttcatctcatgaatgctcctgatcaagaaagagtgagaaaatgaatgt

SEQ ID NO: 1520 - DNA, 167 bp, synthetic construct
  misc_feature 1..167: note = Synthetic
  source 1..167: mol_type = other DNA
gtgcggctggtaaattactgattatctacaccctttcccttttctgtccttccttgactttttccttccacctttcttaaatttttgttatcctttccacaaagattccctccttatgttcatcaaattcacttgtgtctttgtcatagattgtttaaaagggattg

SEQ ID NO: 1521 - DNA, 231 bp, synthetic construct
  misc_feature 1..231: note = Synthetic
  source 1..231: mol_type = other DNA
gtacgaacctaccacctcctcaccatgctgtcttcactctttctgttttcattatttcaagaaaatccagatccaaaccaactcactctccttgcttcaagttttttagcattggcttgtctgttggttctgtctgtgaaacccagtgtgagaagtccagtcactttttatcagcctaaaacaggttagacaattaagccatttgtttgtgataaactcagatttgtctgt

SEQ ID NO: 1522 - DNA, 260 bp, synthetic construct
  misc_feature 1..260: note = Synthetic
  source 1..260: mol_type = other DNA
gtaggttggccagtcccctttctgttgtacctgcaacagataagggctctgctgggtgtattcatttttttgctgtagcttgtacagagtgtgtgggtgttgagctaacagttgtggctcagtattaaccaaaatgttcttgctttaaaggggaaaatgtccttctatggtttgtttgtttgtttctttcccttaaagctatgtttgacttttgtatatgatgaatactataatcacagaaaacaaaaggattatatatt

SEQ ID NO: 1523 - DNA, 223 bp, synthetic construct
  misc_feature 1..223: note = Synthetic
  source 1..223: mol_type = other DNA
gtacttgtgacttaaaacaaattgatggctgctggccccccattcttctccttcttctgcaatatgatttctcttttttgtcattgtgcccatgacatgtccctttctatgatttaaattctgtataacctatctttagtggaccatttctgacccttgtggtatgtgacttttatttttgagtgatgtttttatatctttccccttaaagtgctgtgacctt

SEQ ID NO: 1524 - DNA, 183 bp, synthetic construct
  misc_feature 1..183: note = Synthetic
  source 1..183: mol_type = other DNA
gttggtgttagcatggggtgatgctttgccaactaacaccataaaaatttttccaattttaagaaaagaaggggagaatccctacatctaccctaaagaggatagaaaactgcctactctcctgtattataatactttggtcaagtaatggatctattgaagtatcatccctgaagtatcctc

SEQ ID NO: 1525 - DNA, 205 bp, synthetic construct
  misc_feature 1..205: note = Synthetic
  source 1..205: mol_type = other DNA
gtgcgcagaaagaatcaacatcatcttgctttaacaagactatacatctcatcaaatattcaaaaaaattaattcgttatctaaaaataggaaagaaaattctaaccattttctaccacacttccttttgggcctaatttatctagaactatggacatacttcttgcaaataaaaatgaatgacatcttgaaagagaaactaatg

SEQ ID NO: 1526 - DNA, 194 bp, synthetic construct
  misc_feature 1..194: note = Synthetic
  source 1..194: mol_type = other DNA
gtgagtactctgtcccatgccggccggcacaagagctccagctccaaggccctggccgcgcgccctgcacgccccgcacgcccagccctgctcgctcccgccccggctcgcgctccactcggggccgcctcggcaaggctggcagctccagcctccacggtgaccgcccgcttcgagccctgtggcctgcgccg

SEQ ID NO: 1527 - DNA, 181 bp, synthetic construct
  misc_feature 1..181: note = Synthetic
  source 1..181: mol_type = other DNA
gtacgtatccggctctgttctggccacagtgtacctaacagtgatagcatggtttcttttcttttcaaaagtccagctcttgctgttttatttttactttcctgaaggcactatcagatttctcttttaaagacaagcatctaaaacatgttctaattgttgtggggtccaatccgccagt

SEQ ID NO: 1528 - DNA, 244 bp, synthetic construct; identical to SEQ ID NO: 1418
  misc_feature 1..244: note = Synthetic
  source 1..244: mol_type = other DNA

SEQ ID NO: 1529 - DNA, 237 bp, synthetic construct; identical to SEQ ID NO: 1419
  misc_feature 1..237: note = Synthetic
  source 1..237: mol_type = other DNA

SEQ ID NO: 1530 - DNA, 241 bp, synthetic construct
  misc_feature 1..241: note = Synthetic
  source 1..241: mol_type = other DNA
gtaaattggttgtaaaatatacctttggaaatctttgaataattgaatacaattaatgaatggacattaacaataatgcatgtgaacttcaaagatgatgatatcccaaatctgatcaggatcattttttttatttggcttcttaattgaatcagattttacaactgattgaatttacgtgattacacaagtagcttggttataaaggctgtctgttttatatagacataaagaaaacaac

SEQ ID NO: 1531 - DNA, 244 bp, synthetic construct
  misc_feature 1..244: note = Synthetic
  source 1..244: mol_type = other DNA
gtgaggttttatagcttctaaacatgtcagcagggtggctttttaaattgctgcgctaaccctttcattgtgcattaaaggaaaagtttattaaagataagtggaaaaaaatgtagtctagaggaacttaattatattgtcatttgcctgttataaaatctagcaggcaaatgaaataaaataattgctataaaagatttataaactttgtgaggaaagaagaaaagatctcatcgttaagttt

SEQ ID NO: 1532 - DNA, 252 bp, synthetic construct
  misc_feature 1..252: note = Synthetic
  source 1..252: mol_type = other DNA
gtatgtacccctgatatttctcgaggaaatagaaaacccgggtattgtctctaaaatctgcatcaatatattccacggcactgtgtctatctatccctgtgccttttttgaaggctgaagttgaggctcgttgtgcattctttttcgttagattccatgatttccttgtttgttgctaaaagtaactttttagatagtcgtatccgtttgccatcagctattgaaatcactcctgactcgttcctgtcacac

SEQ ID NO: 1533 - DNA, 160 bp, synthetic construct
  misc_feature 1..160: note = Synthetic
  source 1..160: mol_type = other DNA
gtaggcctcatcagaactgtattctgttgcccttcactgctgctcggccttactgcgctaacctcattcatggtgcttataaaatcgatacattctgatagccgtttggtgccccaacgggccagcttccttcctgaatgaggcattaggtgcaaatctt

SEQ ID NO: 1534 - DNA, 185 bp, synthetic construct
  misc_feature 1..185: note = Synthetic
  source 1..185: mol_type = other DNA
gtaccccccatggtgcccaggactccgaggcccatgagtctgacacgccctccaaaaggggcctaatatcactccacattctccatttcctctatcttaaaagtttaggagagctttacagatatttgtatgtctttttattactcccagaactgctatgaggaaaaaaacccatgatagctact

SEQ ID NO: 1535 - DNA, 199 bp, synthetic construct; identical to SEQ ID NO: 1425
  misc_feature 1..199: note = Synthetic
  source 1..199: mol_type = other DNA

SEQ ID NO: 1536 - DNA, 195 bp, synthetic construct
  misc_feature 1..195: note = Synthetic
  source 1..195: mol_type = other DNA
gtgcgcatgtatttaatataatttatggaaccataagatttattagatcaatgatttccaaactgcaagtcaaggtccaatagtgaattgagaaataaatttagtgaatagcaatcagtcttttttgtagaattttaaagatagtaaatattagacttgatttcaagtaatgtataggttttgttgacatttgtt

SEQ ID NO: 1537 - DNA, 239 bp, synthetic construct
  misc_feature 1..239: note = Synthetic
  source 1..239: mol_type = other DNA
gtattcaacctctctctttgcctctcccctctttccttttctctttcctacttttccattcttgcttcagtcatttgttttaaaataacatgcttcatccatcgcgtatggcttaactcatatccagctgagctggtgcttccaaatttaaattctgaaaatttgatgactttggttgtgttacacatgcaggtgttataagtgatcaaacacatgctaacacgttgctcaccgggttc

SEQ ID NO: 1538 - DNA, 261 bp, synthetic construct
  misc_feature 1..261: note = Synthetic
  source 1..261: mol_type = other DNA
gtacttattgttttctatgtatgtcatatgttctgaaatataatttcaatcaattacacatatgattcttgatgcaaagagatggtttcaaattacctaaaattgtaaaataatatccagattctattaaaaacaaacctcacaatatatgaattttctaatctagatgtaatgtatttgctctttaattttcactgcatgccttattttccaatcatttttaatgaatacttaaaaatatattaaaattctgagtgatct

SEQ ID NO: 1539 - DNA, 225 bp, synthetic construct
  misc_feature 1..225: note = Synthetic
  source 1..225: mol_type = other DNA
gtaccacgcctcccaccaggcgatgtcctcctcctcctccccttccttcatttcttctctctactcctctgcagccagggcggggacatggtctgggggcctcttggggagcaggcaagagttaggctgggcagatggaaccccacttgggcacagcactccttctcttgcagctgacgcacctctcctgccacgctggtttcatgattaactaccttgttcttt

SEQ ID NO: 1540 - DNA, 188 bp, synthetic construct
  misc_feature 1..188: note = Synthetic
  source 1..188: mol_type = other DNA
gtgagagtgtctcgaccagcgtcccgcccgctcccgcccgtccctcctgccagcatgcagccccctgctgcacgcagccgctggccgggctccagagccgccccagaggccgccaggcccccgggagcccctgctcccgtgtggtcacatcccagcagagcccaccacaagggcagggaggcagcccc

SEQ ID NO: 1541 - DNA, 234 bp, synthetic construct
  misc_feature 1..234: note = Synthetic
  source 1..234: mol_type = other DNA
gtacggtgaacctggggcttcccgctcccgctgtgaggctgcactatgcatggctctggggtcagagctgcacagaggtgatgtttttgtgccagactccaaggaatggaagtttggcttggggccctcctgaaggtgcatgcgaggctgacatgagattttggtttggtttcttgattccctggttggttcagataagaatgcttcttaggagaatttgctgtgtggctctaa

SEQ ID NO: 1542 - DNA, 195 bp, synthetic construct
  misc_feature 1..195: note = Synthetic
  source 1..195: mol_type = other DNA
gtaaatagtgggcagtgctagcaaaattcccggggcacttctgtccattatctcaatacctggggttgacatttcctgtctcagatcaggagtcctgactaccctgcctctgaccactcgaactgagtgctgcttagctgtatcgtagacaccgcctgtttgtgaacagacaccctgcttcttgatgataacaca

SEQ ID NO: 1543 - DNA, 246 bp, synthetic construct
  misc_feature 1..246: note = Synthetic
  source 1..246: mol_type = other DNA
gtaggtgtgaatgaaggtagccttaacagtgctttcaaatttgctaaatccaagttgggattaagcttctgttcttaaagcttataattaaagctgcctttcctgacatcaagcttccagagcatgaaatgagatgagcatcatttcttaataagctggagcaaaaatgttattaatgatggtagagggtgtgtattggctaaccaaagattgcaaagtcaattatggaatcaagttaataatcag

SEQ ID NO: 1544 - DNA, 172 bp, synthetic construct
  misc_feature 1..172: note = Synthetic
  source 1..172: mol_type = other DNA
gtacgaagctgggaccacaggcggtgcccaggtttttttttttttttttttttttttcgttggtagagacagggtctcactgttgccaggactgctctgaaactcctggtttcaagtgatccccttgcctcctcccacttaggccttccaaatgctgggattacaaggcatg

SEQ ID NO: 1545 - DNA, 225 bp, synthetic construct
  misc_feature 1..225: note = Synthetic
  source 1..225: mol_type = other DNA
gtatgtgactaaactgtgctaagagcttaatgcttactctctgtcccaccatagtctattggttagacttaaaattggtagttgaataatttcagaaaggctctccatccgccccttcagttttaatgtatatgttttctctggacctgttgcgtgatctggcagggtgctgagggttggatgtgaggaaggagaggccatgtttctttttctgacttttgactg

SEQ ID NO: 1546 - DNA, 258 bp, synthetic construct
  misc_feature 1..258: note = Synthetic
  source 1..258: mol_type = other DNA
gtacttatctatgtctgtctagttctaggacttagtaaaatctagcttggctgattaaaaaaactttaattttatcttttaaccaataagcagaagccattgcggcagccttcataagctaaaatactgctctgtgtagactgtattggtagcttatgttttgaatttacattgtagtgtgctgcatattatttggattatattgtatatggtaacaaaataagctctgctttaaagtctttcttgaatttttttccc

SEQ ID NO: 1547 - DNA, 191 bp, synthetic construct; identical to SEQ ID NO: 1437
  misc_feature 1..191: note = Synthetic
  source 1..191: mol_type = other DNA

SEQ ID NO: 1548 - DNA, 227 bp, synthetic construct
  misc_feature 1..227: note = Synthetic
  source 1..227: mol_type = other DNA
gtacccactaaatttaccatttttgtggcatggataaaatggagtgctatgcaaatactgttgcacgtgagatgatttctaagtccttgcttgatccgtgaagatcaaatagttaaatactgggcatttgggctttaacccttagcggttgatgcatgatggtgttgattagtgctttgagatgtgtcaacctttcttttttatactaacagcatcattttgaaatt

SEQ ID NO: 1549 - DNA, 11 bp, synthetic construct
  misc_feature 1..11: note = Synthetic
  source 1..11: mol_type = other DNA
cagagaatggt

SEQ ID NO: 1550 - DNA, 11 bp, synthetic construct
  misc_feature 1..11: note = Synthetic
  source 1..11: mol_type = other DNA
tgggagatggt

SEQ ID NO: 1551 - DNA, 11 bp, synthetic construct
  misc_feature 1..11: note = Synthetic
  source 1..11: mol_type = other DNA
gattaaatggt

SEQ ID NO: 1552 - DNA, 11 bp, synthetic construct
  misc_feature 1..11: note = Synthetic
  source 1..11: mol_type = other DNA
tacctcatggt

SEQ ID NO: 1553 - DNA, 11 bp, synthetic construct
  misc_feature 1..11: note = Synthetic
  source 1..11: mol_type = other DNA
attcttatggt

SEQ ID NO: 1554 - DNA, 11 bp, synthetic construct
  misc_feature 1..11: note = Synthetic
  source 1..11: mol_type = other DNA
gagggtatggt

SEQ ID NO: 1555 - DNA, 11 bp, synthetic construct
  misc_feature 1..11: note = Synthetic
  source 1..11: mol_type = other DNA
gctggaatggt

SEQ ID NO: 1556 - DNA, 11 bp, synthetic construct
  misc_feature 1..11: note = Synthetic
  source 1..11: mol_type = other DNA
ccgatcatggt

SEQ ID NO: 1557 - DNA, 11 bp, synthetic construct
  misc_feature 1..11: note = Synthetic
  source 1..11: mol_type = other DNA
caaacaatggt

SEQ ID NO: 1558 - DNA, 11 bp, synthetic construct
  misc_feature 1..11: note = Synthetic
  source 1..11: mol_type = other DNA
atatacatggt

SEQ ID NO: 1559 - DNA, 11 bp, synthetic construct
  misc_feature 1..11: note = Synthetic
  source 1..11: mol_type = other DNA
tgaattatggt

SEQ ID NO: 1560 - DNA, 11 bp, synthetic construct
  misc_feature 1..11: note = Synthetic
  source 1..11: mol_type = other DNA
aaactcatggt

SEQ ID NO: 1561 - DNA, 11 bp, synthetic construct
  misc_feature 1..11: note = Synthetic
  source 1..11: mol_type = other DNA
tctggaatggt

SEQ ID NO: 1562 - DNA, 11 bp, synthetic construct
  misc_feature 1..11: note = Synthetic
  source 1..11: mol_type = other DNA
ttcgtcatggt

SEQ ID NO: 1563 - DNA, 11 bp, synthetic construct
  misc_feature 1..11: note = Synthetic
  source 1..11: mol_type = other DNA
caatccatggt

SEQ ID NO: 1564 - DNA, 11 bp, synthetic construct
  misc_feature 1..11: note = Synthetic
  source 1..11: mol_type = other DNA
gcctgcatggt

SEQ ID NO: 1565 - DNA, 11 bp, synthetic construct
  misc_feature 1..11: note = Synthetic
  source 1..11: mol_type = other DNA
gccgagatggt

SEQ ID NO: 1566 - DNA, 11 bp, synthetic construct
  misc_feature 1..11: note = Synthetic
  source 1..11: mol_type = other DNA
tgttatatggt

SEQ ID NO: 1567 - DNA, 11 bp, synthetic construct
  misc_feature 1..11: note = Synthetic
  source 1..11: mol_type = other DNA
agcagtatggt

SEQ ID NO: 1568 - DNA, 11 bp, synthetic construct
  misc_feature 1..11: note = Synthetic
  source 1..11: mol_type = other DNA
ttggccatggt

SEQ ID NO: 1569 - DNA, 11 bp, synthetic construct
  misc_feature 1..11: note = Synthetic
  source 1..11: mol_type = other DNA
agacaaatggt

SEQ ID NO: 1570 - DNA, 11 bp, synthetic construct
  misc_feature 1..11: note = Synthetic
  source 1..11: mol_type = other DNA
gtgccaatggt

SEQ ID NO: 1571 - DNA, 11 bp, synthetic construct
  misc_feature 1..11: note = Synthetic
  source 1..11: mol_type = other DNA
gatagaatggt

SEQ ID NO: 1572 - DNA, 11 bp, synthetic construct
  misc_feature 1..11: note = Synthetic
  source 1..11: mol_type = other DNA
cttccgatggt

SEQ ID NO: 1573 - DNA, 11 bp, synthetic construct
  misc_feature 1..11: note = Synthetic
  source 1..11: mol_type = other DNA
tccctaatggt

SEQ ID NO: 1574 - DNA, 11 bp, synthetic construct
  misc_feature 1..11: note = Synthetic
  source 1..11: mol_type = other DNA
ctgattatggt

SEQ ID NO: 1575 - DNA, 11 bp, synthetic construct
  misc_feature 1..11: note = Synthetic
  source 1..11: mol_type = other DNA
cagttcatggt

SEQ ID NO: 1576 - DNA, 11 bp, synthetic construct
  misc_feature 1..11: note = Synthetic
  source 1..11: mol_type = other DNA
gccagaatggt

SEQ ID NO: 1577 - DNA, 11 bp, synthetic construct
  misc_feature 1..11: note = Synthetic
  source 1..11: mol_type = other DNA
cccagaatggt

SEQ ID NO: 1578 - DNA, 11 bp, synthetic construct
  misc_feature 1..11: note = Synthetic
  source 1..11: mol_type = other DNA
ctcctgatggt

SEQ ID NO: 1579 - DNA, 11 bp, synthetic construct
  misc_feature 1..11: note = Synthetic
  source 1..11: mol_type = other DNA
cagcttatggt

SEQ ID NO: 1580 - DNA, 11 bp, synthetic construct
  misc_feature 1..11: note = Synthetic
  source 1..11: mol_type = other DNA
ccgtatatggt

SEQ ID NO: 1581 - DNA, 11 bp, synthetic construct
  misc_feature 1..11: note = Synthetic
  source 1..11: mol_type = other DNA
tcatctatggt

SEQ ID NO: 1582 - DNA, 11 bp, synthetic construct
  misc_feature 1..11: note = Synthetic
  source 1..11: mol_type = other DNA
gacactatggt

SEQ ID NO: 1583 - DNA, 11 bp, synthetic construct
  misc_feature 1..11: note = Synthetic
  source 1..11: mol_type = other DNA
cctgtaatggt

SEQ ID NO: 1584 - DNA, 11 bp, synthetic construct
  misc_feature 1..11: note = Synthetic
  source 1..11: mol_type = other DNA
ggtacaatggt

SEQ ID NO: 1585 - DNA, 11 bp, synthetic construct
  misc_feature 1..11: note = Synthetic
  source 1..11: mol_type = other DNA
gcaggaatggt

SEQ ID NO: 1586 - DNA, 11 bp, synthetic construct
  misc_feature 1..11: note = Synthetic
  source 1..11: mol_type = other DNA
gctactatggt

SEQ ID NO: 1587 - DNA, 11 bp, synthetic construct
  misc_feature 1..11: note = Synthetic
  source 1..11: mol_type = other DNA
gctagcatggt

SEQ ID NO: 1588 - DNA, 11 bp, synthetic construct
  misc_feature 1..11: note = Synthetic
  source 1..11: mol_type = other DNA
catcatatggt

SEQ ID NO: 1589 - DNA, 11 bp, synthetic construct
  misc_feature 1..11: note = Synthetic
  source 1..11: mol_type = other DNA
ttaaatatggt

SEQ ID NO: 1590 - DNA, 11 bp, synthetic construct
  misc_feature 1..11: note = Synthetic
  source 1..11: mol_type = other DNA
ttgaacatggt

SEQ ID NO: 1591 - DNA, 11 bp, synthetic construct
  misc_feature 1..11: note = Synthetic
  source 1..11: mol_type = other DNA
acctctatggt

SEQ ID NO: 1592 - DNA, 11 bp, synthetic construct
  misc_feature 1..11: note = Synthetic
  source 1..11: mol_type = other DNA
cgtgccatggt

SEQ ID NO: 1593 - DNA, 11 bp, synthetic construct
  misc_feature 1..11: note = Synthetic
  source 1..11: mol_type = other DNA
agctttatggt

SEQ ID NO: 1594 - DNA, 11 bp, synthetic construct
  misc_feature 1..11: note = Synthetic
  source 1..11: mol_type = other DNA
tttcagatggt

SEQ ID NO: 1595 - DNA, 11 bp, synthetic construct
  misc_feature 1..11: note = Synthetic
  source 1..11: mol_type = other DNA
aatttgatggt

SEQ ID NO: 1596 - DNA, 11 bp, synthetic construct
  misc_feature 1..11: note = Synthetic
  source 1..11: mol_type = other DNA
ttttatatggt

SEQ ID NO: 1597 - DNA, 11 bp, synthetic construct
  misc_feature 1..11: note = Synthetic
  source 1..11: mol_type = other DNA
tcccaaatggt

SEQ ID NO: 1598 - DNA, 11 bp, synthetic construct
  misc_feature 1..11: note = Synthetic
  source 1..11: mol_type = other DNA
ggttgcatggt

SEQ ID NO: 1599 - DNA, 11 bp, synthetic construct
  misc_feature 1..11: note = Synthetic
  source 1..11: mol_type = other DNA
ttggagatggt

SEQ ID NO: 1600 - DNA, 11 bp, synthetic construct
  misc_feature 1..11: note = Synthetic
  source 1..11: mol_type = other DNA
aaggtcatggt

SEQ ID NO: 1601 - DNA, 11 bp, synthetic construct
  misc_feature 1..11: note = Synthetic
  source 1..11: mol_type = other DNA
gaggagatggt

SEQ ID NO: 1602 - DNA, 11 bp, synthetic construct
  misc_feature 1..11: note = Synthetic
  source 1..11: mol_type = other DNA
caaggaatggt

SEQ ID NO: 1603 - DNA, 11 bp, synthetic construct
  misc_feature 1..11: note = Synthetic
  source 1..11: mol_type = other DNA
tcctccatggt

SEQ ID NO: 1604 - DNA, 11 bp, synthetic construct
  misc_feature 1..11: note = Synthetic
  source 1..11: mol_type = other DNA
cgctggatggt

SEQ ID NO: 1605 - DNA, 11 bp, synthetic construct
  misc_feature 1..11: note = Synthetic
  source 1..11: mol_type = other DNA
cgctggatggt

SEQ ID NO: 1606 - DNA, 11 bp, synthetic construct
  misc_feature 1..11: note = Synthetic
  source 1..11: mol_type = other DNA
tcctctatggt

SEQ ID NO: 1607 - DNA, 11 bp, synthetic construct
  misc_feature 1..11: note = Synthetic
  source 1..11: mol_type = other DNA
tgggttatggt

SEQ ID NO: 1608 - DNA, 11 bp, synthetic construct
  misc_feature 1..11: note = Synthetic
  source 1..11: mol_type = other DNA
ccgctgatggt

SEQ ID NO: 1609 - DNA, 11 bp, synthetic construct
  misc_feature 1..11: note = Synthetic
  source 1..11: mol_type = other DNA
ccaagaatggt

SEQ ID NO: 1610 - DNA, 11 bp, synthetic construct
  misc_feature 1..11: note = Synthetic
  source 1..11: mol_type = other DNA
tgggagatggt

SEQ ID NO: 1611 - DNA, 11 bp, synthetic construct
  misc_feature 1..11: note = Synthetic
  source 1..11: mol_type = other DNA
ctccacatggt

SEQ ID NO: 1612 - DNA, 11 bp, synthetic construct
  misc_feature 1..11: note = Synthetic
  source 1..11: mol_type = other DNA
gaagaaatggt

SEQ ID NO: 1613 - DNA, 11 bp, synthetic construct
  misc_feature 1..11: note = Synthetic
  source 1..11: mol_type = other DNA
cgatttatggt

SEQ ID NO: 1614 - DNA, 11 bp, synthetic construct
  misc_feature 1..11: note = Synthetic
  source 1..11: mol_type = other DNA
cttctcatggt

SEQ ID NO: 1615 - DNA, 11 bp, synthetic construct
  misc_feature 1..11: note = Synthetic
  source 1..11: mol_type = other DNA
gagattatggt

SEQ ID NO: 1616 - DNA, 11 bp, synthetic construct
  misc_feature 1..11: note = Synthetic
  source 1..11: mol_type = other DNA
gacccaatggt

SEQ ID NO: 1617 - DNA, 11 bp, synthetic construct
  misc_feature 1..11: note = Synthetic
  source 1..11: mol_type = other DNA
ccattaatggt

SEQ ID NO: 1618 - DNA, 11 bp, synthetic construct
  misc_feature 1..11: note = Synthetic
  source 1..11: mol_type = other DNA
agaagaatggt

SEQ ID NO: 1619 - DNA, 11 bp, synthetic construct
  misc_feature 1..11: note = Synthetic
  source 1..11: mol_type = other DNA
gagaaaatggt

SEQ ID NO: 1620 - DNA, 11 bp, synthetic construct
  misc_feature 1..11: note = Synthetic
  source 1..11: mol_type = other DNA
aaattgatggt

SEQ ID NO: 1621 - DNA, 11 bp, synthetic construct
  misc_feature 1..11: note = Synthetic
  source 1..11: mol_type = other DNA
tcctcgatggt

SEQ ID NO: 1622 - DNA, 11 bp, synthetic construct
  misc_feature 1..11: note = Synthetic
  source 1..11: mol_type = other DNA
gtctctatggt

SEQ ID NO: 1623 - DNA, 11 bp, synthetic construct
  misc_feature 1..11: note = Synthetic
  source 1..11: mol_type = other DNA
gagcaaatggt

SEQ ID NO: 1624 - DNA, 11 bp, synthetic construct
  misc_feature 1..11: note = Synthetic
  source 1..11: mol_type = other DNA
gtatcaatggt

SEQ ID NO: 1625 - DNA, 11 bp, synthetic construct
  misc_feature 1..11: note = Synthetic
  source 1..11: mol_type = other DNA
ccttctatggt

SEQ ID NO: 1626 - DNA, 11 bp, synthetic construct
  misc_feature 1..11: note = Synthetic
  source 1..11: mol_type = other DNA
gacagcatggt

SEQ ID NO: 1627 - DNA, 11 bp, synthetic construct
  misc_feature 1..11: note = Synthetic
  source 1..11: mol_type = other DNA
acgggaatggt

SEQ ID NO: 1628 - DNA, 11 bp, synthetic construct
  misc_feature 1..11: note = Synthetic
  source 1..11: mol_type = other DNA
aaaattatggt

SEQ ID NO: 1629 - DNA, 11 bp, synthetic construct
  misc_feature 1..11: note = Synthetic
  source 1..11: mol_type = other DNA
aagtggatggt

SEQ ID NO: 1630 - DNA, 11 bp, synthetic construct
  misc_feature 1..11: note = Synthetic
  source 1..11: mol_type = other DNA
tgtgctatggt

SEQ ID NO: 1631 - DNA, 11 bp, synthetic construct
  misc_feature 1..11: note = Synthetic
  source 1..11: mol_type = other DNA
taaccaatggt

SEQ ID NO: 1632 - DNA, 11 bp, synthetic construct
  misc_feature 1..11: note = Synthetic
  source 1..11: mol_type = other DNA
ctgattatggt

SEQ ID NO: 1633 - DNA, 11 bp, synthetic construct
  misc_feature 1..11: note = Synthetic
  source 1..11: mol_type = other DNA
attcctatggt

SEQ ID NO: 1634 - DNA, 11 bp, synthetic construct
  misc_feature 1..11: note = Synthetic
  source 1..11: mol_type = other DNA
aattaaatggt

SEQ ID NO: 1635 - DNA, 11 bp, synthetic construct
  misc_feature 1..11: note = Synthetic
  source 1..11: mol_type = other DNA
tgaaacatggt

SEQ ID NO: 1636 - DNA, 11 bp, synthetic construct
  misc_feature 1..11: note = Synthetic
  source 1..11: mol_type = other DNA
cccgagatggt

SEQ ID NO: 1637 - DNA, 11 bp, synthetic construct
  misc_feature 1..11: note = Synthetic
  source 1..11: mol_type = other DNA
acctcaatggt

SEQ ID NO: 1638 - DNA, 11 bp, synthetic construct
  misc_feature 1..11: note = Synthetic
  source 1..11: mol_type = other DNA
tgattaatggt

SEQ ID NO: 1639 - DNA, 11 bp, synthetic construct
  misc_feature 1..11: note = Synthetic
  source 1..11: mol_type = other DNA
gacagcatggt

SEQ ID NO: 1640 - DNA, 11 bp, synthetic construct
  misc_feature 1..11: note = Synthetic
  source 1..11: mol_type = other DNA
ttttggatggt

SEQ ID NO: 1641 - DNA, 11 bp, synthetic construct
  misc_feature 1..11: note = Synthetic
  source 1..11: mol_type = other DNA
gctccaatggt

SEQ ID NO: 1642 - DNA, 11 bp, synthetic construct
  misc_feature 1..11: note = Synthetic
  source 1..11: mol_type = other DNA
ttccttatggt

SEQ ID NO: 1643 - DNA, 11 bp, synthetic construct
  misc_feature 1..11: note = Synthetic
  source 1..11: mol_type = other DNA
aggagcatggt

SEQ ID NO: 1644 - DNA, 11 bp, synthetic construct
  misc_feature 1..11: note = Synthetic
  source 1..11: mol_type = other DNA
ccttggatggt

SEQ ID NO: 1645 - DNA, 11 bp, synthetic construct
  misc_feature 1..11: note = Synthetic
  source 1..11: mol_type = other DNA
acatttatggt

SEQ ID NO: 1646 - DNA, 11 bp, synthetic construct
  misc_feature 1..11: note = Synthetic
  source 1..11: mol_type = other DNA
acagtcatggt

SEQ ID NO: 1647 - DNA, 11 bp, synthetic construct
  misc_feature 1..11: note = Synthetic
  source 1..11: mol_type = other DNA
ctactaatggt

SEQ ID NO: 1648 - DNA, 11 bp, synthetic construct
  misc_feature 1..11: note = Synthetic
  source 1..11: mol_type = other DNA
aacttcatggt

SEQ ID NO: 1649 - DNA, 11 bp, synthetic construct
  misc_feature 1..11: note = Synthetic
  source 1..11: mol_type = other DNA
acacacatggt

SEQ ID NO: 1650 - DNA, 11 bp, synthetic construct
  misc_feature 1..11: note = Synthetic
  source 1..11: mol_type = other DNA
tggaacatggt

SEQ ID NO: 1651 - DNA, 11 bp, synthetic construct
  misc_feature 1..11: note = Synthetic
  source 1..11: mol_type = other DNA
gctgtcatggt

SEQ ID NO: 1652 - DNA, 11 bp, synthetic construct
  misc_feature 1..11: note = Synthetic
  source 1..11: mol_type = other DNA
gagaagatggt

SEQ ID NO: 1653 - DNA, 11 bp, synthetic construct
  misc_feature 1..11: note = Synthetic
  source 1..11: mol_type = other DNA
aatatcatggt

SEQ ID NO: 1654 - DNA, 11 bp, synthetic construct
  misc_feature 1..11: note = Synthetic
  source 1..11: mol_type = other DNA
tcccgaatggt

SEQ ID NO: 1655 - DNA, 11 bp, synthetic construct
  misc_feature 1..11: note = Synthetic
  source 1..11: mol_type = other DNA
atcagaatggt

SEQ ID NO: 1656 - DNA, 11 bp, synthetic construct
  misc_feature 1..11: note = Synthetic
  source 1..11: mol_type = other DNA
acatacatggt

SEQ ID NO: 1657 - DNA, 11 bp, synthetic construct
  misc_feature 1..11: note = Synthetic
  source 1..11: mol_type = other DNA
gccaacatggt

SEQ ID NO: 1658 - DNA, 11 bp, synthetic construct
  misc_feature 1..11: note = Synthetic
  source 1..11: mol_type = other DNA
tatttaatggt

SEQ ID NO: 1659-1878 - skipped (220 entries)

SEQ ID NO: 1879 - DNA, 141 bp, synthetic construct
  misc_feature 1..141: note = Synthetic
  source 1..141: mol_type = other DNA
cctgcaggcagctgcgcgctcgctcgctcactgaggccgcccgggcaaagcccgggcgtcgggcgacctttggtcgcccggcctcagtgagcgagcgagcgcgcagagagggagtggccaactccatcactaggggttcct

SEQ ID NO: 1880 - DNA, 782 bp, synthetic construct
  misc_feature 1..782: note = Synthetic
  source 1..782: mol_type = other DNA
ggtaccacccttcagattaaaaataactgaggtaagggcctgggtaggggaggtggtgtgagacgctcctgtctctcctctatctgcccatcggccctttggggaggaggaatgtgcccaaggactaaaaaaaggccatggagccagaggggcgagggcaacagacctttcatgggcaaaccttggggccctgctgtctagcatgccccactacgggtctaggctgcccatgtaaggaggcaaggcctggggacacccgagatgcctggttataattaacccagacatgtggctgcccccccccccccaacacctgctgcctctaaaaataaccctgtccctggtggatcccctgcatgcgaagatcttcgaacaaggctgtgggggactgagggcaggctgtaacaggcttgggggccagggcttatacgtgcctgggactcccaaagtattactgttccatgttcccggcgaagggccagctgtcccccgccagctagactcagcacttagtttaggaaccagtgagcaagtcagcccttggggcagcccatacaaggccatggggctgggcaagctgcacgcctgggtccggggtgggcacggtgcccgggcaacgagctgaaagctcatctgctctcaggggcccctccctggggacagcccctcctggctagtcacaccctgtaggctcctctatataacccaggggcacaggggctgccctcattctaccaccacctccacagcacagacagacactcaggagccagccagctagc

SEQ ID NO: 1881 - DNA, 1846 bp, synthetic construct
  misc_feature 1..1846: note = Synthetic
  misc_feature 164..173: note = n is a, c, g, or t
  source 1..1846: mol_type = other DNA
gcttctgcatcaacttctaaatataattcacactccttggagaatgagtctataaagaggacgtctcgagatggagtgaatcgagatctcactgaggctgttcctcgacttccaggagaaacactaatcactgacaaagaagttatttacatatgtccatttannnnnnnnnnatggccccattaagggaagagtttacatcacaaattatcgtctttatttaagaagtttggaaacggattcttctctaatacttgatgttcctctgggtgtgatctcgagaattgaaaaaatgggaggcgcgacaagtagaggagaaaattcctatggtctagatattacttgtaaagacatgagaaacctgaggttcgctttgaaacaggaaggccacagcagaagagatatgtttgagatcctcacgagatacgcgtttcccctggctcacagtctgccattatttgcatttttaaatgaagaaaagtttaacgtggatggatggacagtttacaatccagtggaagaatacaggaggcagggcttgcccaatcaccattggagaataacttttattaataagtgctatgagctctgtgacacttaccctgctcttttggtggttccgtatcgtgcctcagatgatgacctccggagagttgcaacttttaggtcccgaaatcgaattccagtgctgtcatggattcatccagaaaataagacggtcattgtgcgttgcagtcagcctcttgtcggtatgagtgggaaacgaaataaagatgatgagaaatatctcgatgttatcagggagactaataaacaaatttctaaactcaccatttatgatgcaagacccagcgtaaatgcagtggccaacaaggcaacaggaggaggatatgaaagtgatgatgcatatcataacgccgaacttttcttcttagacattcataatattcatgttatgcgggaatctttaaaaaaagtgaaggacattgtttatcctaatgtagaagaatctcattggttgtccagtttggagtctactcattggttagaacatatcaagctcgttttgacaggagccattcaagtagcagacaaagtttcttcagggaagagttcagtgcttgtgcattgcagtgacggatgggacaggactgctcagctgacatccttggccatgctgatgttggatagcttctataggagcattgaagggttcgaaatactggtacaaaaagaatggataagttttggacataaatttgcatctcgaataggtcatggtgataaaaaccacaccgatgctgaccgttctcctatttttctccagtttattgattgtgtgtggcaaatgtcaaaacagttccctacagcttttgaattcaatgaacaatttttgattataattttggatcatctgtatagttgccgatttggtactttcttattcaactgtgaatctgctcgagaaagacagaaggttacagaaaggactgtttctttatggtcactgataaacagtaataaagaaaaattcaaaaaccccttctatactaaagaaatcaatcgagttttatatccagttgccagtatgcgtcacttggaactctgggtgaattactacattagatggaaccccaggatcaagcaacaacagccgaatccagtggagcagcgttacatggagctcttagccttacgcgacgaatacataaagcggcttgaggaactgcagctcgccaactctgccaagctttctgatcccccaacttcaccttccagtccttcgcaaatgatgccccatgtgcaaactcacttctacccatacgacgtaccagattacgcttag

SEQ ID NO: 1882 - DNA, 2500 bp, synthetic construct
  misc_feature 1..2500: note = Synthetic
  misc_feature 226..235: note = n is a, c, g, or t
  source 1..2500: mol_type = other DNA
ccgaccgtcattagcgcatctgtggctccaaggacagcggctgagccccggtccccagggccagttcctcacccggcccagagcaaggccactgaggctgggggtggaaacccaagtggcatctattcagccatcatcagccgcaattttcctattatcggagtgaaagagaagacattcgagcaacttcacaagaaatgtcttgaaaagaaagttctttatgtannnnnnnnnngaccctgagttcccaccggacgagacctctctcttttatagccagaagttccccatccagttcgtctggaagagacctccggaaatatgtgagaatccccgatttatcattgatggagccaacagaactgacatctgtcaaggagagctaggggactgctggtttctcgcagccattgcctgcctgaccctgaaccagcaccttcttttccgagtcataccccatgatcaaagtttcatcgaaaactacgcagggatcttccacttccagttctggcgctatggagagtgggtggacgtggttatagatgactgcctgccaacgtacaacaatcaactggttttcaccaagtccaaccaccgcaatgagttctggagtgctctgctggagaaggcttatgctaagctccatggttcctacgaagctctgaaaggtgggaacaccacagaggccatggaggacttcacaggaggggtggcagagttttttgagatcagggatgctcctagtgacatgtacaagatcatgaagaaagccatcgagagaggctccctcatgggctgctccattgatgatggcacgaacatgacctatggaacctctccttctggtctgaacatgggggagttgattgcacggatggtaaggaatatggataactcactgctccaggactcagacctcgaccccagaggctcagatgaaagaccgacccggacaatcattccggttcagtatgagacaagaatggcctgcgggctggtcagaggtcacgcctactctgtcacggggctggatgaggtcccgttcaaaggtgagaaagtgaagctggtgcggctgcggaatccgtggggccaggtggagtggaacggttcttggagtgatagatggaaggactggagctttgtggacaaagatgagaaggcccgtctgcagcaccaggtcactgaggatggagagttctggatgtcctatgaggatttcatctaccatttcacaaagttggagatctgcaacctcacggccgatgctctgcagtctgacaagcttcagacctggacagtgtctgtgaacgagggccgctgggtacggggttgctctgccggaggctgccgcaacttcccagatactttctggaccaaccctcagtaccgtctgaagctcctggaggaggacgatgaccctgatgactcggaggtgatttgcagcttcctggtggccctgatgcagaagaaccggcggaaggaccggaagctaggggccagtctcttcaccattggcttcgccatctacgaggttcccaaagagatgcacgggaacaagcagcacctgcagaaggacttcttcctgtacaacgcctccaaggccaggagcaaaacctacatcaacatgcgggaggtgtcccagcgcttccgcctgcctcccagcgagtacgtcatcgtgccctccacctacgagccccaccaggagggggaattcatcctccgggtcttctctgaaaagaggaacctctctgaggaagttgaaaataccatctccgtggatcggccagtgaaaaagaaaaaaaccaagcccatcatcttcgtttcggacagagcaaacagcaacaaggagctgggtgtggaccaggagtcagaggagggcaaaggcaaaacaagccctgataagcaaaagcagtccccacagccacagcctggcagctctgatcaggaaagtgaggaacagcaacaattccggaacattttcaagcagatagcaggagatgacatggagatctgtgcagatgagctcaagaaggtccttaacacagtcgtgaacaaacacaaggacctgaagacacacgggttcacactggagtcctgccgtagcatgattgcgctcatggatacagatggctctggaaagctcaacctgcaggagttccaccacctctggaacaagattaaggcctggcagaaaattttcaaacactatgacacagaccagtccggcaccatcaacagctacgagatgcgaaatgcagtcaacgacgcaggattccacctcaacaaccagctctatgacatcattaccatgcggtacgcagacaaacacatgaacatcgactttgacagtttcatctgctgcttcgttaggctggagggcatgttcagagcttttcatgcatttgacaaggatggagatggtatcatcaagctcaacgttctggagtggctgcagctcaccatgtatgcctacccatacgacgtaccagattacgcttag

SEQ ID NO: 1883 - DNA, 135 bp, synthetic construct
  misc_feature 1..135: note = Synthetic
  source 1..135: mol_type = other DNA
cttaagatacattgatgagtttggacaaaccacaactagaatgcagtgaaaaaaatgctttatttgtgaaatttgtgatgctattgctttatttgtaaccattataagctgcaataaacaagttctgattttgta

SEQ ID NO: 1884 - DNA, 122 bp, synthetic construct
  misc_feature 1..122: note = Synthetic
  source 1..122: mol_type = other DNA
aaaatccctgcaccagaacccgctctcccgccccggggaggttttgattttagtggctttcttccttttattttccgtcgtgtgcggatttcgctgcagagcgaacttgcggctcgtccgag

SEQ ID NO: 1885 - DNA, 122 bp, synthetic construct
  misc_feature 1..122: note = Synthetic
  source 1..122: mol_type = other DNA
tccgccttccccggagctgtgtcggcccaggactgcagggcgtgagcccagaccccggccctcgcctccctcactgccctgccgtcccgggagacttacagcgcgaggggccgctgggtcac

SEQ ID NO: 1886 - DNA, 122 bp, synthetic construct
  misc_feature 1..122: note = Synthetic
  source 1..122: mol_type = other DNA
cacggccagcccgcatccacccaatgccaggcctcagggccaagagggctcagcctcagcacggggggagccctggggtggggagacgcgagcgcccacctgcgcaccccagcagccttccg

SEQ ID NO: 1887 - DNA, 122 bp, synthetic construct
  misc_feature 1..122: note = Synthetic
  source 1..122: mol_type = other DNA
acctaaatccctacctagcatgatcagtttggtttcgctgtacaccagacagccaaaacttgcaaggttttgattgaacaacaaatactgcgtgcttactctgtaccaagcatcaggactag

SEQ ID NO: 1888 - DNA, 122 bp, synthetic construct
  misc_feature 1..122: note = Synthetic
  source 1..122: mol_type = other DNA
ccgtttttttacagcttttctgacacagcgggaccacgctcgcggcaccacagctctcgggaggtgacccggagataatggcccagtaggaacactcaccatagcgtctgtcttggtagtct

SEQ ID NO: 1889 - DNA, 122 bp, synthetic construct
  misc_feature 1..122: note = Synthetic
  source 1..122: mol_type = other DNA
acacacacaatatagttgctacatatattttcatatttcttaataagctatctcattttattttgtataaaaacgaactctctattcaaaatctcttacctgataaaacaagagatgaattt

SEQ ID NO: 1890 - DNA, 122 bp, synthetic construct
  misc_feature 1..122: note = Synthetic
  source 1..122: mol_type = other DNA
tcaacaatagtgttacttttgaccctttaattgtaccacctgtgcgcatcataccaagccttgcatcttcatcagtggcaaaaacgatgaaagcctcacccagttcaccccctacaatatgc

SEQ ID NO: 1891 - DNA, 122 bp, synthetic construct
  misc_feature 1..122: note = Synthetic
  source 1..122: mol_type = other DNA
cttgatttgcatgctagaaaataaaacgttttggttaatttttggtatcttatgccaagccccaagtaggaaatgggtatctacctcctgtccacttacatttcgtggggttctccgggtca

SEQ ID NO: 1892 - DNA, 122 bp, synthetic construct
  misc_feature 1..122: note = Synthetic
  source 1..122: mol_type = other DNA
gctaggggtagtctgtctaagtgaacagaaggacattgttgaaagtgaagtatcattatttttattcctgcatcgtcttttgttctttattcttggcagcggtaaaactcctccaggcagct

SEQ ID NO: 1893 - DNA, 122 bp, synthetic construct
  misc_feature 1..122: note = Synthetic
  source 1..122: mol_type = other DNA
ttgaaaatgttttctttctaaactacacttttaaagttacttgtgaaaaaaagcaaacacttttttgttataacagcttagaaattggttgtgactcacggctcgatgaacatgaggctttc

SEQ ID NO: 1894 - DNA, 122 bp, synthetic construct
  misc_feature 1..122: note = Synthetic
  source 1..122: mol_type = other DNA
gagacttaagttaaaacaaaattcaacatagaaaaaccgtcactgcctatacagcactcatgtcagagtgttccatgaggtcccccaaaatgcacctaccgtcccagccaggatgtcatggg

SEQ ID NO: 1895 - DNA, 122 bp, synthetic construct
  misc_feature 1..122: note = Synthetic
  source 1..122: mol_type = other DNA
tttattcttgcatataaacagaatacatgtaataactacatattctatgaaatattccaaaactactatagttttattaaaatttgcaaaagtaccaaccttttagagaactgtttctcaga

SEQ ID NO: 1896 - DNA, 107 bp, synthetic construct
  misc_feature 1..107: note = Synthetic
  source 1..107: mol_type = other DNA
cagacagacataagaagagttttcaaattttagtggctctgcagcctctatcaatacagaggaaatactgtggatcaaatgataagtaatggctcttaccttggctt

SEQ ID NO: 1897 - DNA, 122 bp, synthetic construct
  misc_feature 1..122: note = Synthetic
  source 1..122: mol_type = other DNA
atttcacaccatcctactttagagagtaaattatcagcctgtcctggtttggatgagtctactgtttcagcctggttcagcccagtgtctcctctttaggtccgtatctctcttatgaaaga

SEQ ID NO: 1898 - DNA, 122 bp, synthetic construct
  misc_feature 1..122: note = Synthetic
  source 1..122: mol_type = other DNA
ttttccacatttatataaattgaatcgtataatatgtgtcctcttgcttctggctgtatttactattaatcagttctgttgtattttatttttaaacagatttctccttaaaaatatcagtc

SEQ ID NO: 1899 - DNA, 122 bp, synthetic construct
  misc_feature 1..122: note = Synthetic
  source 1..122: mol_type = other DNA
tcaaaaaactttgtacctcttatacttttatgtaatagcattcagacattcctatttcgttatcgaagggtttgctcttacgacaaaacaaaaactcaccttgagacaaccataaccaagtt

SEQ ID NO: 1900 - DNA, 122 bp, synthetic construct
  misc_feature 1..122: note = Synthetic
  source 1..122: mol_type = other DNA
gttcctctttggaaaaggtttgcataacctgtgactcttttaaccctccccacagctcactggatctgcttaatgacttgcttgtgttattgcttccaggtcaggggtcaccacattgcaaa

SEQ ID NO: 1901 - DNA, 122 bp, synthetic construct
  misc_feature 1..122: note = Synthetic
  source 1..122: mol_type = other DNA
aattttaatgtaattttactttttttttaccccttccctctttttttttcttctgtccttttgtgtgtgtccttccctctcatcgttggccactcatagatacgagggcaccatgtagcaca

SEQ ID NO: 1902 - DNA, 122 bp, synthetic construct
  misc_feature 1..122: note = Synthetic
  source 1..122: mol_type = other DNA
ttaaaataacagttcaattctgtgtttgaaaaaaaaagcattatttcaaatgtgttctttaggctcattaatttactttattcttgaaaagaaacataccagcttgcgaattcggtccaaca

SEQ ID NO: 1903 - DNA, 122 bp, synthetic construct
  misc_feature 1..122: note = Synthetic
  source 1..122: mol_type = other DNA
ttagtaaaatgttgtaaaatttgatatccttttgaaaacgctttctctatgtgtactgaatttttttctgttgtctgcctttgtttcctgtttttaaagatcttgacttctcatgggtaaat

SEQ ID NO: 1904 - DNA, 122 bp, synthetic construct
  misc_feature 1..122: note = Synthetic
  source 1..122: mol_type = other DNA
cttcacccacgtgcgctgcggcttcgttcgccagcatccaagatggcggcagggcggggcccaaggcgcggcgcgaattgtgacgcaggcgtccggcgtgctccgtgcgcaagcgctttcgg

SEQ ID NO: 1905 - DNA, 122 bp, synthetic construct
  misc_feature 1..122: note = Synthetic
  source 1..122: mol_type = other DNA
aaagacttcatctgagaggtgacttggactaggaggggcaagttagaagttttaagggaagatgtgccaggaaggctaacctctcaccataatacataccccccatctaagtcaaaagttgt

SEQ ID NO: 1906 - DNA, 122 bp, synthetic construct
  misc_feature 1..122: note = Synthetic
  source 1..122: mol_type = other DNA
taggtaaaatatctcagtggcaggcccaggaaaaggtgaagtgtcctaggacaggaaaaagatgaaggaaacggaaagggaaactgactcgaatcccaccttatcatgcagagtccaaccaa

SEQ ID NO: 1907 - DNA, 122 bp, synthetic construct
  misc_feature 1..122: note = Synthetic
  source 1..122: mol_type = other DNA
ggttggggggatttttggttatgttaaatgtttgatgtttaaattgttgcatgttgaattcaaactttttaacaagtccttgatgtttcaatttgaaagtgaccaatggggctgaggctgtg

SEQ ID NO: 1908 - DNA, 122 bp, synthetic construct
  misc_feature 1..122: note = Synthetic
  source 1..122: mol_type = other DNA
ttgtgagtggtattaccttttgattagttatagaatgagttacacaactcaaaagctttaggtaatcaaaaattaagtttgttttctttcctgttctagttaccggtttactaaaatagtga

SEQ ID NO: 1909 - DNA, 116 bp, synthetic construct
  misc_feature 1..116: note = Synthetic
  source 1..116: mol_type = other DNA
agatggccaggagccctggctgtctccccatgctcccacccagctcatttggcccccaggtggtgtaaggcagctggcagtcagcccacagctactcacggtctcaggggccccgc

SEQ ID NO: 1910 - DNA, 122 bp, synthetic construct
  misc_feature 1..122: note = Synthetic
  source 1..122: mol_type = other DNA
tctagtaactagttcaatttgtctttattgtggttaaaaaaaacccagaagattgacagttgtaactattttatgtatttacgtattttttttttttagagacagggtctcgctctgtcgcc

SEQ ID NO: 1911 - DNA, 122 bp, synthetic construct
  misc_feature 1..122: note = Synthetic
  source 1..122: mol_type = other DNA
gctgaggtaggccctatggaaaaaggtgaaatgggatcccctgttggtcaggacataataggttatgctgtggaaaacacaagccccaaactcagtggcttcgcacatcaaaaatttatttc

SEQ ID NO: 1912 - DNA, 122 bp, synthetic construct
  misc_feature 1..122: note = Synthetic
  source 1..122: mol_type = other DNA
aattcatagagttctcggagggacagaaaaggctgagcctagactcgtgctggaggccctcttctggggagttgtgagagatgcatatgatgtactcactggtctttgtgagccacgtaaat

SEQ ID NO: 1913 - DNA, 122 bp, synthetic construct
  misc_feature 1..122: note = Synthetic
  source 1..122: mol_type = other DNA
tattaaacctatatcaatattcaaatgtgatttttgaggaaaatatgttaaatttagaaatattttccaacttactgagttttcttattcttacctcagggggatttccctgtgcaatgaag

SEQ ID NO: 1914 - DNA, 122 bp, synthetic construct
  misc_feature 1..122: note = Synthetic
  source 1..122: mol_type = other DNA
gagcagttctttgggcatggatgccgtgctcaaaggccaccacctgcaagaaggctggggcgtccagcctccactgccagcagaagtcagcctccttacctgccgtcgcctgggctcggccc

SEQ ID NO: 1915 - DNA, 122 bp, synthetic construct
  misc_feature 1..122: note = Synthetic
  source 1..122: mol_type = other DNA
gagtctttcgtgaaatttctacacaaaatgcagccaacaactgctttgtcctcaaaaaccccagaagaatattttaagtattatcttaaacacacttacctggattttgatcttgatcgaga

SEQ ID NO: 1916 - DNA, 122 bp, synthetic construct
  misc_feature 1..122: note = Synthetic
  source 1..122: mol_type = other DNA
agttaattctgggaactcctaccaagctcctgctgcctgccaagttctatgcaggtcacgaggctgtcccttctgtgagccatctcttgtccagagcaggtagctgggaccgggcatctgct

SEQ ID NO: 1917 - DNA, 122 bp, synthetic construct
  misc_feature 1..122: note = Synthetic
  source 1..122: mol_type = other DNA
attccctacttgaaccagatcaccaattctctattaactaagtaatcatgcaaattcatctacaacttgatcatacagacactggaacataaaccatacatttacttaacctaggacccatt

SEQ ID NO: 1918 - DNA, 122 bp, synthetic construct
  misc_feature 1..122: note = Synthetic
  source 1..122: mol_type = other DNA
cgctgttggcacggtaggacaaaagaagggaatgcttgcttgtgaggacaatcaaaggctgtccttgtctctgagtccttttgcccttgtctcccacaggtcctggtgcttgatggtcgagg

SEQ ID NO: 1919 - DNA, 122 bp, synthetic construct
  misc_feature 1..122: note = Synthetic
  source 1..122: mol_type = other DNA
ccccttccgaggctaaatcggctgcgttcctctcggaacgcgccgcagaaggggtcctggtgacgagtcccgcgttctctccttgaatccactcgccagcccgccgccctctgccgccgcac

SEQ ID NO: 1920 - DNA, 122 bp, synthetic construct
  misc_feature 1..122: note = Synthetic
  source 1..122: mol_type = other DNA
atgtttcaagaaccatcccccagtatctatcctacaaccaagagccccggcctctagaaagccccaaacccccaggatgcatttcctttgcgtactaaccggctttcccggttttattcccg

SEQ ID NO: 1921 - DNA, 122 bp, synthetic construct
  misc_feature 1..122: note = Synthetic
  source 1..122: mol_type = other DNA
gacgtaaaagacttagctcaatgcctggcatataaacactctatacatggtaactatcatgatttaaaagtttaataggatgggtgcagtggttctcacctgtaatcccagcactttggaaa

SEQ ID NO: 1922 - DNA, 122 bp, synthetic construct
  misc_feature 1..122: note = Synthetic
  source 1..122: mol_type = other DNA
aggctatggagagcccagggctggacaggcctgaggttccgacatacctcatgccaggccacacgcgcaccgtgtcccaccctcagccgaaaaccaagatcaagaccatccaataatttact

SEQ ID NO: 1923 - DNA, 122 bp, synthetic construct
  misc_feature 1..122: note = Synthetic
  source 1..122: mol_type = other DNA
tgttttatcatctgtgactgttccaacagctctttgtctccacagtgcttattattattagcacagtgtctggcatatattaggtattcaaatacttactgaataaaccaaccacgaggagc

SEQ ID NO: 1924 - DNA, 122 bp, synthetic construct
  misc_feature 1..122: note = Synthetic
  source 1..122: mol_type = other DNA
cggcgtccacatgggcagggatgggtgggggagggtgggcagggctgcggcgtgtccaggggccgccgtattaattgactgttcttattgtcactgcagccaccacgcagctggcttgcagc

SEQ ID NO: 1925 - DNA, 122 bp, synthetic construct
  misc_feature 1..122: note = Synthetic
  source 1..122: mol_type = other DNA
gccacatccattagaatatgaagtcccagtcagtacaacaatagttgaactgattgtttctctaagaggatagtgcatctttaacatttaaagacaaacctgctccaatacacgcccacaga

SEQ ID NO: 1926 - DNA, 122 bp, synthetic construct
  misc_feature 1..122: note = Synthetic
  source 1..122: mol_type = other DNA
gcacttaaatgcagattattttggagtttgaaaagggactattaatgaaatctttcttttccctcctttctctttttcccttccccgccactgattcagtgagctggagattggatcacagg

SEQ ID NO: 1927 - DNA, 122 bp, synthetic construct
  misc_feature 1..122: note = Synthetic
  source 1..122: mol_type = other DNA
gaaccagatcaccaattctctattaactaagtaatcatgcaaattcatctacaacttgatcatacagacactggaacataaaccatacatttacttaacctaggacccattcattcttccag

SEQ ID NO: 1928 - DNA, 122 bp, synthetic construct
  misc_feature 1..122: note = Synthetic
  source 1..122: mol_type = other DNA
tccatcacttgagttgtatgtcttccaaatgaatttttccatgtttgcgcagcaaggtaatgacacgacctcaactttatcttttttgtgtatcctcaggaatgggtagctctcgagaatct

SEQ ID NO: 1929 - DNA, 122 bp, synthetic construct
  misc_feature 1..122: note = Synthetic
  source 1..122: mol_type = other DNA
gccgcagagctccccacggaggggtcccagcctggagcccgggcaccgcccatctctaacccgccgctagccccggaccctcccgcgcctgctccgcaccacggagccgggcctccagagca

SEQ ID NO: 1930 - DNA, 122 bp, synthetic construct
  misc_feature 1..122: note = Synthetic
  source 1..122: mol_type = other DNA
caggggtgggagtgattaaaatccagggccaaaatatagtacagatcttttatcccaatggttacaaattaaaaggggcttctcaaatccagacctcaccctttggactggccatttgctcg

SEQ ID NO: 1931 - DNA, 122 bp, synthetic construct
  misc_feature 1..122: note = Synthetic
  source 1..122: mol_type = other DNA
aaaacagaactttctgttaaagaaaacatagttaacatttttacactcagctctgtaaaaaatttaaattaaaaaagaaaaaacatctttgttttatacctttatttaacaaggacaaattt

SEQ ID NO: 1932 - DNA, 122 bp, synthetic construct
  misc_feature 1..122: note = Synthetic
  source 1..122: mol_type = other DNA
gagtctcgtcgaccgtattcccacccatccccaaatttgttgtgaacttcaacaatactgtcctcacaagaccttaaccctcacattaagaccaatcacctgaaaaaaagcaccatgccgta

SEQ ID NO: 1933 - DNA, 122 bp, synthetic construct
  misc_feature 1..122: note = Synthetic
  source 1..122: mol_type = other DNA
cctcccatgctacagacggcatgctaacagttgggtggggggtcctgtaaatctcaccaatgggttctgcactccttgaccctgctcttaagcactgaccttcaggagcttgaagcgagaag

SEQ ID NO: 1934 - DNA, 122 bp, synthetic construct; identical to SEQ ID NO: 1931
  misc_feature 1..122: note = Synthetic
  source 1..122: mol_type = other DNA

SEQ ID NO: 1935 - DNA, 122 bp, synthetic construct; identical to SEQ ID NO: 1932
  misc_feature 1..122: note = Synthetic
  source 1..122: mol_type = other DNA

SEQ ID NO: 1936 - DNA, 122 bp, synthetic construct
  misc_feature 1..122: note = Synthetic
  source 1..122: mol_type = other DNA
ttttccttttgtggatgttttaattttaatcaaccatcttttccccccttcctgctcctcctcctcctcatcctctttctgctcctcctccttgaaaagagccagaactgggaactacaccc

SEQ ID NO: 1937 - DNA, 122 bp, synthetic construct
  misc_feature 1..122: note = Synthetic
  source 1..122: mol_type = other DNA
cctcctaaatagggagacccaagattctgtagcttctggcccaatccctcatggccccagagcactctgggcctcctgaccctttgtctccctagacagcacccaagaaaacctcatttggc

SEQ ID NO: 1938 - DNA, 122 bp, synthetic construct
  misc_feature 1..122: note = Synthetic
  source 1..122: mol_type = other DNA
gtctttttacacagcctcagttaatcagctctgcccccatctccattacgtctgaataatttgcccagtaggaaaataggccaatagtcaacaacataccctctgatatacagccttgcagg

SEQ ID NO: 1939 - DNA, 122 bp, synthetic construct
  misc_feature 1..122: note = Synthetic
  source 1..122: mol_type = other DNA
gtcttgccgttcatgttgttgccatctcgtatttaaatgtaaatgcatgtccaagtttcaagtatattcacataggactttctctcctgccctcacaagggaaaaagaccttgatgaagttc

SEQ ID NO: 1940 - DNA, 122 bp, synthetic construct
  misc_feature 1..122: note = Synthetic
  source 1..122: mol_type = other DNA
gattcctccctagttcccactcagctaactggctgagttttagaaccagggtcacttatctgatcccagaatcctcaacaccatctgtggccaccttacccgaacatgtggctgcaatttcc

SEQ ID NO: 1941 - DNA, 122 bp, synthetic construct
  misc_feature 1..122: note = Synthetic
  source 1..122: mol_type = other DNA
tttaccatgctggccaggctggtctcgaactcctgacctcaagtgatccacctgcctcagcctcccaaagtgctgggtttacaagcgtgagccacacacctggcctagtgggtcccccagtc

SEQ ID NO: 1942 - DNA, 122 bp, synthetic construct
  misc_feature 1..122: note = Synthetic
  source 1..122: mol_type = other DNA
tggcaaagcagagctgtggggacctgtaggttcagaagagggaacagagtagacaggctgcatagagtgaacagcagaagcgccagtggtgttacttacgtgcgcggggaagggctggagtc

SEQ ID NO: 1943 - DNA, 122 bp, synthetic construct
  misc_feature 1..122: note = Synthetic
  source 1..122: mol_type = other DNA
aaggggcgcagcgataccggtgcgcggcgctggcgtcgggcgcgtgacgtctttcctgcgcgccacctagcgtctctatcgcgccagttcctcagcctcagtgctatgaaggtgacagcgtg

SEQ ID NO: 1944 - DNA, 122 bp, synthetic construct
  misc_feature 1..122: note = Synthetic
  source 1..122: mol_type = other DNA
aaccaagacactaaagccaagagttttgaacaaatgcttgtcatctcctgcaaaagtctgtatcaaggactacagtgctctgtctaggatatttctcacctggaacttctccagctcactgg

SEQ ID NO: 1945 - DNA, 122 bp, synthetic construct
  misc_feature 1..122: note = Synthetic
  source 1..122: mol_type = other DNA
tttgagtgaaccctggtttagttatagtggctttatccctaaataaattgaattgtactttgttatatgatgtaaaaaaagactttttaaaaaatacaggagtcgatagcagcagttggtga

SEQ ID NO: 1946 - DNA, 122 bp, synthetic construct
  misc_feature 1..122: note = Synthetic
  source 1..122: mol_type = other DNA
gtgagagtgtttgcatgtgattgaacatggagtaggaagctgtggttaagatttaaactgggataacatcacactctgtcctctactttaatgaggcaggattgcagatgttatgggctgat

SEQ ID NO: 1947 - DNA, 122 bp, synthetic construct
  misc_feature 1..122: note = Synthetic
  source 1..122: mol_type = other DNA
cgcggccggacggcccagtctggagggttcggggcggaggcccgggggggtgcgcgcgcccggggtccggcctctcactcgctcccctctcgtccgcagccgcagggccgtaggcagccatg

SEQ ID NO: 1948 - DNA, 122 bp, synthetic construct
  misc_feature 1..122: note = Synthetic
  source 1..122: mol_type = other DNA
ggccgatgccagggcggggggcgctgtctgcaaccgtcgcggagcgctggcctggcggccttaggcaagggtgaccgccgctgcgcttctctccaccagacgtaaggcccggcaagccaagg

SEQ ID NO: 1949 - DNA, 122 bp, synthetic construct
  misc_feature 1..122: note = Synthetic
  source 1..122: mol_type = other DNA
gacaatgagttatacctgtttcttccacttcctttaaatggcaaggaagctgaaagtagaacagaacatttgtttttatttaccaacaactacacttaccttataaacagaactgccaccaa

SEQ ID NO: 1950 - DNA, 122 bp, synthetic construct
  misc_feature 1..122: note = Synthetic
  source 1..122: mol_type = other DNA
cagtgaacccaatttgtagtctgaaaagacatgttattttctatagtcttaagcaggaaatccaaagtgcttcagactaattaataaccttatacttactctggcagaagtttatatttctc

SEQ ID NO: 1951 - DNA, 122 bp, synthetic construct
  misc_feature 1..122: note = Synthetic
  source 1..122: mol_type = other DNA
ccctgatcatcaatgcctaaatataaggtggctgctcagaatttattaattttcacggtaaatccaaaggtgtcctaagaaagtcatcactgcagctaccttttttgagtggaacatgagga

SEQ ID NO: 1952 - DNA, 122 bp, synthetic construct
  misc_feature 1..122: note = Synthetic
  source 1..122: mol_type = other DNA
cccttaatcctgcctcatagaagcaattcgtcttgccaggagatgatgatggcatcacggtgtggtgtcccatccctgtgccaccctggctaacgttacctgggctcggtgctccccgacgg

SEQ ID NO: 1953 - DNA, 122 bp, synthetic construct
  misc_feature 1..122: note = Synthetic
  source 1..122: mol_type = other DNA
caccagcatctcacttgcttctttttctctgcactttgagttgccaaatcctgttggattgcttttttgatctcaatcccctaacaccttttcttccagaagagcttaaagcagcgcctggg

SEQ ID NO: 1954 - DNA, 122 bp, synthetic construct
  misc_feature 1..122: note = Synthetic
  source 1..122: mol_type = other DNA
ccaagctccactggaaggattaactatagaagttacagtgctttacaaattcttccctcctcaccaagtgccaaccaaaactactacgccaggacacacgttttagaactttccctagatgt

SEQ ID NO: 1955 - DNA, 122 bp, synthetic construct; identical to SEQ ID NO: 1888
  misc_feature 1..122: note = Synthetic
  source 1..122: mol_type = other DNA

SEQ ID NO: 1956 - DNA, 113 bp, synthetic construct
  misc_feature 1..113: note = Synthetic
  source 1..113: mol_type = other DNA
tcttgtgacctgttttcaagttttctagtgctttcttctgtcacatctcatctaattgagtgaccgcaactcctaagtatattgtgactttattttcaggataagggagatct

SEQ ID NO: 1957 - DNA, 122 bp, synthetic construct
  misc_feature 1..122: note = Synthetic
  source 1..122: mol_type = other DNA
agcgattctcctgcctcagcctcccgagtagctgggattacaggcgcgcgccaccacacccatctaacttttatatttttagtagagatggagtcttaccatgttggccaggctggtctcga

SEQ ID NO: 1958 - DNA, 114 bp, synthetic construct
  misc_feature 1..114: note = Synthetic
  source 1..114: mol_type = other DNA
acatttcccttaaattatatatagttaatataagtttttattgaaatcataacttttcatttatatttgaataatcatttcccccaaagacatatttaccttcagccagtgctg

SEQ ID NO: 1959 - DNA, 122 bp, synthetic construct
  misc_feature 1..122: note = Synthetic
  source 1..122: mol_type = other DNA
aatatgaaatatagaattctgaagtctagaaaacaagagattacaaagaggtgggacagtaagtttcagttaactagaaaatacataaatgcgctttacctctcgtatttcgtggccagctc

SEQ ID NO: 1960 - DNA, 122 bp, synthetic construct
  misc_feature 1..122: note = Synthetic
  source 1..122: mol_type = other DNA
tatttttttttttactacctaaaaaaagatttgttaaaagctgaattacaacttagcattacataatataaaacactgtaatgtgtatttaaaataaaccttgcaagtttgcaggtcgaccc

SEQ ID NO: 1961 - DNA, 122 bp, synthetic construct
  misc_feature 1..122: note = Synthetic
  source 1..122: mol_type = other DNA
ttcaataattatatctgttcacaggtaagtttttcccctacatcatgatgaaagctgaggaataaagatgaccgagacagtaaatttccccacacttactaaaatactttgtaaagcagttc

SEQ ID NO: 1962 - DNA, 122 bp, synthetic construct
  misc_feature 1..122: note = Synthetic
  source 1..122: mol_type = other DNA
ccctgaaaatcatttatgaaaaaaatatagagcacacagatatctcggtttagaacatgaagacttgcccaaaataacaccaggattctaatcacttaccttagcagtggttttctttatag

SEQ ID NO: 1963 - DNA, 122 bp, synthetic construct; identical to SEQ ID NO: 1921
  misc_feature 1..122: note = Synthetic
  source 1..122: mol_type = other DNA

SEQ ID NO: 1964 - DNA, 122 bp, synthetic construct
  misc_feature 1..122: note = Synthetic
  source 1..122: mol_type = other DNA
gaggtggaggttgcagtgagctgagatcacgccactgcactccagcctggtgacagagcaagactccgtctccaaaaaaaaaaagaaactgaggtgtacctggctcctttccacatcttggt

SEQ ID NO: 1965 - DNA, 122 bp, synthetic construct
  misc_feature 1..122: note = Synthetic
  source 1..122: mol_type = other DNA
gaactgaaagcccaagcgcggcggcgtccagccgggcagccattttccgaagctgctctcttggtaaccccgcccgggcgcgtacgcacgaacggaggcggggcttaccgcgagggcctcgc

SEQ ID NO: 1966 - DNA, 122 bp, synthetic construct
  misc_feature 1..122: note = Synthetic
  source 1..122: mol_type = other DNA
ctgttatcaccactcccacccccacggccttcaccctcggacggtgtgtcccgtccccggcgaggccccgccccctgcgaggccccgccccctcctcacctcgtacttcttcatacagctct

SEQ ID NO: 1967 - DNA, 122 bp, synthetic construct
  misc_feature 1..122: note = Synthetic
  source 1..122: mol_type = other DNA
gtatccacagctcaagcaacaaggtcaggaaaagaaaatctctttggtacaatggtcaaacaaccccgactatctaaagatgaaataataatgccatacctgatcctggtgatcaaagaagg

SEQ ID NO: 1968 - DNA, 122 bp, synthetic construct
  misc_feature 1..122: note = Synthetic
  source 1..122: mol_type = other DNA
gataatagtatctcacagggaaacattttctttcattccagtggccttagtcatctctgaagaaatacttacttgatttttttttttccaatcaaacagagcagtatagctgtgactatgga

SEQ ID NO: 1969 - DNA, 122 bp, synthetic construct
  misc_feature 1..122: note = Synthetic
  source 1..122: mol_type = other DNA
ccgcccggccccctcctcccaccaccactgcttcccctgcctcacgtcccgccaccaacgcgcccttcagctgctcccttgtcctctacccccatgtacctgtttcctgcgctgccacgtgc

SEQ ID NO: 1970 - DNA, 122 bp, synthetic construct
  misc_feature 1..122: note = Synthetic
  source 1..122: mol_type = other DNA
gagaggtggagcttagggtctcagagctcacctagcagggcgcccctcctgcctgtcccacttgggttccggaagaggtgcccttgccttgtattttagacatggggcgccggctgctgggg

SEQ ID NO: 1971 - DNA, 122 bp, synthetic construct
  misc_feature 1..122: note = Synthetic
  source 1..122: mol_type = other DNA
aaggtagatctaatttagtgttacagaatctttattttgaaattgttgtacttgtgagctggcaacttgtactgacttgattttttttcttccacttagcatggaggatgaaaaggaagata

SEQ ID NO: 1972 - DNA, 122 bp, synthetic construct
  misc_feature 1..122: note = Synthetic
  source 1..122: mol_type = other DNA
gcaggccacaagaaaagttgcaggtggtcactggggtagacatgctgtacaacccttccctggccctgacccttggacctggttccatgtccccaccaggaagtggccatgcgcaagctggt

SEQ ID NO: 1973 - DNA, 116 bp, synthetic construct
  misc_feature 1..116: note = Synthetic
  source 1..116: mol_type = other DNA
caacattatctctatgatattgatctctatttgcttgacggctgcccttcttaagatcatgaattacaatatattcaaatttgttttttctgaaacaaggaagaacagatgaggca

SEQ ID NO: 1974 - DNA, 122 bp, synthetic construct
  misc_feature 1..122: note = Synthetic
  source 1..122: mol_type = other DNA
gggccccaagggtggggacctgggcacagcctcgctatcggcagccagaggggtcccctatggcccccgccactgggaccttttgtttcttcaatccagggatgcaccagacacctatcact

SEQ ID NO: 1975 - DNA, 122 bp, synthetic construct
  misc_feature 1..122: note = Synthetic
  source 1..122: mol_type = other DNA
tgctcttcgacatgagcatcagggccctgtggagggcgcgaggtcaggggccacaggccgcagatcaagggtcaggtgaggggcaagtgttgggctgacctcatggggtgcaggtggaacag

SEQ ID NO: 1976 - DNA, 122 bp, synthetic construct
  misc_feature 1..122: note = Synthetic
  source 1..122: mol_type = other DNA
gtggcagttctcgtagactgtgttggtttaacaagcgtccaacccttttgtcttgttgttttttgtctttcctgctccctgtccccttgtttcccacaggctgtgcgtttgtcacattttct

SEQ ID NO: 1977 - DNA, 122 bp, synthetic construct
  misc_feature 1..122: note = Synthetic
  source 1..122: mol_type = other DNA
ttggcgatttagaacagataaggatgaatgttgtaatggtttttctattccttctggggttgtctgtcattctactcacgatgatctaggtaatggcctaagactggggccctttctcttat

SEQ ID NO: 1978 - DNA, 122 bp, synthetic construct
  misc_feature 1..122: note = Synthetic
  source 1..122: mol_type = other DNA
tctgccttatctttagtaattgtgtttatgttggctatctggctattgcccttgcgtgacagacacaagtgacagtgctgatggcccttctgattgcagatgtcccaggagagaggagtaca

SEQ ID NO: 1979 - DNA, 122 bp, synthetic construct
  misc_feature 1..122: note = Synthetic
  source 1..122: mol_type = other DNA
gcccccagccctgactctgactcctcagagcacccgagtaagcaagtcttacacaaaaacacgaacgagaacattcgaggaaattctggaatgactcaccacgtagatctgtgacaggactg

SEQ ID NO: 1980 - DNA, 122 bp, synthetic construct
  misc_feature 1..122: note = Synthetic
  source 1..122: mol_type = other DNA
ggaccgaaacacacagaggcattgcggggctcagagaagaacagtgtagaaacccgcgctgtgtgaagcgaggttgggcgcaagagaagcaggcatgacctggccaacggggaggccggaag

SEQ ID NO: 1981 - DNA, 122 bp, synthetic construct
  misc_feature 1..122: note = Synthetic
  source 1..122: mol_type = other DNA
tcaactacaagaaaagaaatggtgtattgtcatttttgccaaagcaccccaaaatgaaatactttcttactcaatctaggttcttttttttcattctagtcccttaagctcctaggattttt

SEQ ID NO: 1982 - DNA, 123 bp, synthetic construct
  misc_feature 1..123: note = Synthetic
  source 1..123: mol_type = other DNA
cgaagcagaagaatccaaggaaggtaggattctggtttctcctgggggccggccaagttctgcggaggaatttggaggaaggcagtggtagaagaggatgggagttttaaagtgagcggtggg

SEQ ID NO: 1983 - DNA, 123 bp, synthetic construct
  misc_feature 1..123: note = Synthetic
  source 1..123: mol_type = other DNA
gagctagagccagagcggctgccctgtgtcaagggagagggtcagtgagtgctgctccctggctggggcggggcggggcgggtccctggctagctgtggggtggagagctgcctcacctgccg

SEQ ID NO: 1984 - DNA, 123 bp, synthetic construct
  misc_feature 1..123: note = Synthetic
  source 1..123: mol_type = other DNA
ggccgcggaagtagtgaaggagcctggaagggatgggtgggtgtgagcccaacctgacaccagcccccagaggcctctgctgaagagccactgctgggaatcagctctgagctgcccacaggc

SEQ ID NO: 1985 - DNA, 123 bp, synthetic construct
  misc_feature 1..123: note = Synthetic
  source 1..123: mol_type = other DNA
gcagacccatgggagatctcctcctgaaccccagcaacgggggtggggtgaggtagggtgggtaggagaggttgatccgaatcccagggtcccacgccatcgtagatttcgtatgaaaagaaa

SEQ ID NO: 1986 - DNA, 123 bp, synthetic construct
  misc_feature 1..123: note = Synthetic
  source 1..123: mol_type = other DNA
aatttgtcttggtcccaggacaactaggaagaattaggtgaaggatggaggagttctctaaaggaagggggttgggggaggtcaagggaagacctccatattatttttctcttcctcatacat

SEQ ID NO: 1987 - DNA, 123 bp, synthetic construct
  misc_feature 1..123: note = Synthetic
  source 1..123: mol_type = other DNA
accaattaaaaccaacttttagactgcaatagagaataaacggaggcaaaaatcaatgcaggaaacacaaaacaacacgcacaggccacactgtacattacgaaggcgagtctgaaaccacca

SEQ ID NO: 1988 - DNA, 123 bp, synthetic construct
  misc_feature 1..123: note = Synthetic
  source 1..123: mol_type = other DNA
tgctgcgctgaaaccacacacacctgcagatgagaaaaggcaacggccaggtcagactcctgtttatcacaccaagtttttagctacaagaatgaccagctaccatattaggccctcaaatat

SEQ ID NO: 1989 - DNA, 123 bp, synthetic construct
  misc_feature 1..123: note = Synthetic
  source 1..123: mol_type = other DNA
gggcctcaccaatccagtcaaccctttggaagaaaatacagcctgtttcaatccaatgctggatcttccaggcgtaaaatgactcgacgcatccgcagggcacaactcaaccgtaaccctcta

SEQ ID NO: 1990 - DNA, 123 bp, synthetic construct
  misc_feature 1..123: note = Synthetic
  source 1..123: mol_type = other DNA
atcatgtgcttcagaagaaagaggtacgagtgagcagttgcctttgattagtgcctgtttccctttcccgactgcatggcacggagcagctggacctgtgggtcccgcaccacttccccttct

SEQ ID NO: 1991 - DNA, 123 bp, synthetic construct
  misc_feature 1..123: note = Synthetic
  source 1..123: mol_type = other DNA
aggcaggcaaagatacactgaacctttataaataaaatagaggggccacaattgttcagtttgtatgaaataaaaatatgggaagcaattcaaaagcaactcaatatacaaagaaagctaaaa

SEQ ID NO: 1992 - DNA, 123 bp, synthetic construct
  misc_feature 1..123: note = Synthetic
  source 1..123: mol_type = other DNA
gaccctctgtctggtttcgtctcctgaaattcatttgtggttttaaataagacaatattatcacattaaccaccaaaaaataactagtataacaattcacctggatgatttgcagactatcat

SEQ ID NO: 1993 - DNA, 123 bp, synthetic construct
  misc_feature 1..123: note = Synthetic
  source 1..123: mol_type = other DNA
accttctcccgtagaaattgctcctattttaaaacagaaaaaatgcaaaactagggaagagaaccctagatattcactagggaaggtaccctaggaatagagcttaggttattatcaaatact

SEQ ID NO: 1994 - DNA, 106 bp, synthetic construct
  misc_feature 1..106: note = Synthetic
  source 1..106: mol_type = other DNA
tagccactttacgttggcaaaaaaagggggggaaaaagtagacattaatgctaggtaagttatatccgataggacaggtttacatttacagttactcaattcatgt

SEQ ID NO: 1995 - DNA, 123 bp, synthetic construct
  misc_feature 1..123: note = Synthetic
  source 1..123: mol_type = other DNA
acctgatagtggaagaaaagtaggttagttctccttcttcctattgcctgtccttatcactcatctctttcttctatatggatatttgtatattttctcattcatgaaaatctgtaaacctag

SEQ ID NO: 1996 - DNA, 123 bp, synthetic construct
  misc_feature 1..123: note = Synthetic
  source 1..123: mol_type = other DNA
tcaagaccagcctggccaacatggtaaaatcctgtctctactaaaaatataaaactagctgggcatggtggcctacacctgtaatcccagctactctggaggctgaggcaggggaatcacttg

SEQ ID NO: 1997 - DNA, 123 bp, synthetic construct
  misc_feature 1..123: note = Synthetic
  source 1..123: mol_type = other DNA
agatgttaaaaaatggcgtgattctgcaacggtaagaatattgattgcttttttaaaagatgccttgtaggcagagacaagtcatttactccatttatgccttactcagtactggcaccgaat

SEQ ID NO: 1998 - DNA, 123 bp, synthetic construct
  misc_feature 1..123: note = Synthetic
  source 1..123: mol_type = other DNA
agtaactgtttcttcaaacgtgggtgagaattaagctgtaaatgctaattttaatgtaattttactttttttttaccccttccctctttttttttcttctgtccttttgtgtgtgtccttccc

SEQ ID NO: 1999 - DNA, 123 bp, synthetic construct
  misc_feature 1..123: note = Synthetic
  source 1..123: mol_type = other DNA
tatctcatccacagacaaacttggtgagggtctgagagcagtcagctgcgttgcttgagctcctctcgctgtgccacgacctgtggtagccaggatgtccaggcaggagggaaaggctcttaa

SEQ ID NO: 2000 - DNA, 123 bp, synthetic construct
  misc_feature 1..123: note = Synthetic
  source 1..123: mol_type = other DNA
gtaggtgccagtgcgaacttcatctggagaacatgatgggggaggagcaggggggaggaggaggagggacgaggagcggggagggagagtgggtgagtgaccagcggagccccccaggacaga

SEQ ID NO: 2001 - DNA, 123 bp, synthetic construct
  misc_feature 1..123: note = Synthetic
  source 1..123: mol_type = other DNA
tatgccctacatcttggaatgaggtgacttttttttttttttttttgatattttggccaattattgatcagtacttggaggtctcctgggataccatttgaggtcctgtaacttgagagaaag

SEQ ID NO: 2002 - DNA, 123 bp, synthetic construct
  misc_feature 1..123: note = Synthetic
  source 1..123: mol_type = other DNA
ggttggtggcggcggtcgtgcgggttcgcgccgggccgagagcgggttgggggctgcgggaggctgcaggggcctgggcggcagaagaggcggccctgagctggctcatgcgggccagtctcg

SEQ ID NO: 2003 - DNA, 123 bp, synthetic construct
  misc_feature 1..123: note = Synthetic
  source 1..123: mol_type = other DNA
tgtaaaatttgtctctcgcgtccctgtggaggaaattgaaaacagacacagaaagtcttattaaaccttttaaccattaattcaattgacacagtgttgttaatgttcaactcatacttcaaa

SEQ ID NO: 2004 - DNA, 123 bp, synthetic construct
  misc_feature 1..123: note = Synthetic
  source 1..123: mol_type = other DNA
cacggatctcaggaaggacatccctagacacagacagataagttgactcttagagccaccctctctccaaactcactttccatcctaccagttaactccctctcatggaagaatttattttct

SEQ ID NO: 2005 - DNA, 123 bp, synthetic construct
  misc_feature 1..123: note = Synthetic
  source 1..123: mol_type = other DNA
caccaaaaacctcacactgtgatgtaagtacttagtgtaaaactagtaaacatttttgtaaaatgtagaaatgcatgtaatcagttaagttttatattttacaatgttctgtaaaataaaact

SEQ ID NO: 2006 - DNA, 123 bp, synthetic construct
  misc_feature 1..123: note = Synthetic
  source 1..123: mol_type = other DNA
ggattactttggctattttccaggtactggggaaattccaaatgcattacaagttattgggatggctattaattattcatttcctaaaatatgttgactgaagacttgagatttggttatata

SEQ ID NO: 2007 - DNA, 115 bp, synthetic construct
  misc_feature 1..115: note = Synthetic
  source 1..115: mol_type = other DNA
ccacggcctctggctctgtttgatagaggatcagggttatggaagaagtcccaggtctagagccaggacagcatgtgcagtgatgtgtggggttggggtgtgtgtatggcatgta

SEQ ID NO: 2008 - DNA, 123 bp, synthetic construct
  misc_feature 1..123: note = Synthetic
  source 1..123: mol_type = other DNA
ccgaagaactgggacttttagaggcgagctaccaagcccatcctgtaaccattttaaaatgtacaattcagtggcattaagtacattcagaatgcagtgtactgttgtggagtcttcccgcta

SEQ ID NO: 2009 - DNA, 123 bp, synthetic construct
  misc_feature 1..123: note = Synthetic
  source 1..123: mol_type = other DNA
cgcaggccatcatccgaggcaatctgtccaaagacaaggtggggaagagcaggaactaggcctaaccatcacccactggactggtgggaagaggctacaagcgggcaaccctctggtacccaa

SEQ ID NO: 2010 - DNA, 123 bp, synthetic construct
  misc_feature 1..123: note = Synthetic
  source 1..123: mol_type = other DNA
gagggtagggtcccccctttcacctcaaaaacaaaacaatagaacaaatattactgagagctatgaatacattttgttattgcctactatctaaagtagcaggaaaaattggttgctatttac

SEQ ID NO: 2011 - DNA, 123 bp, synthetic construct
  misc_feature 1..123: note = Synthetic
  source 1..123: mol_type = other DNA
ttcaaatagtaaccacattactggtaagtaaacggtggggttattgggtttagcaagtggggaagtaaggggtgaacaaaacacgagagatggtggctacacccctactaagactgccttacc

SEQ ID NO: 2012 - DNA, 123 bp, synthetic construct
  misc_feature 1..123: note = Synthetic
  source 1..123: mol_type = other DNA
agtccataagcttcacaccaaagctacacagagagaagaaacagtcaacacaccatgcgagcagactactgagacagaagcccatcggtccacatgtgttaaaaccacacatggggatagcca

SEQ ID NO: 2013 - DNA, 123 bp, synthetic construct
  misc_feature 1..123: note = Synthetic
  source 1..123: mol_type = other DNA
tcaatttcttcacgaacattaaccttaatggaaaaagaacatttagtatatttaagcacgtggggattataaaactctgctggagttcagaatgttatctaccaaatggaaaagccagcaggt

SEQ ID NO: 2014 - DNA, 123 bp, synthetic construct
  misc_feature 1..123: note = Synthetic
  source 1..123: mol_type = other DNA
gaggaccatccagtgtgcaaaaggtacggcggccgggctgcatgggctgcgtgggctcctggctcccgaagtgggtgggagagaagagctggcacgtgctggttttgaaggtgtgatcggtgt

SEQ ID NO: 2015 - DNA, 123 bp, synthetic construct; identical to SEQ ID NO: 2013
  misc_feature 1..123: note = Synthetic
  source 1..123: mol_type = other DNA

SEQ ID NO: 2016 - DNA, 123 bp, synthetic construct
  misc_feature 1..123: note = Synthetic
  source 1..123: mol_type = other DNA
gttggggactccaggctcaagaagtaattatgtattaggctagtttttcatttaaacaggaacttagctctggcaagtactgcgctgtgtctggagggtgactgcataggcagtggtgggacc

SEQ ID NO: 2017 - DNA, 123 bp, synthetic construct
  misc_feature 1..123: note = Synthetic
  source 1..123: mol_type = other DNA
cacccgcccctctcctgtgccaggtgagcgcccctcttcacgtgcggggaccagggaccgtggagagggatcttgggggcagtggcgggttgggcgtccgcgtggaggcctcccccatcccat

SEQ ID NO: 2018 - DNA, 123 bp, synthetic construct
  misc_feature 1..123: note = Synthetic
  source 1..123: mol_type = other DNA
gcgtcccaggtcgtcgcacgcacctggaagattccgaaatcctcctgctgtgcatcctgccgtaggccgtgcttccaagggatgcggaagcgcgtgcggctcttgttcacccaggccacgccc

SEQ ID NO: 2019 - DNA, 123 bp, synthetic construct
  misc_feature 1..123: note = Synthetic
  source 1..123: mol_type = other DNA
ctgaacactgtaaatgtccaaatctggaggaacagaggaaggtaaacatttgattctcaagtggaagttcaaagcattacattctttctggaggacagtttggaaacatgtacacaaagtaat

SEQ ID NO: 2020 - DNA, 123 bp, synthetic construct
  misc_feature 1..123: note = Synthetic
  source 1..123: mol_type = other DNA
gtgtagaaggcatcctccactccctgggaaaggagggatgggatcaggagggaccggcctgtggccgcctgcctgggtgaggggctccctgctgtgggatcaagccttgcctggcccgaagct

SEQ ID NO: 2021 - DNA, 123 bp, synthetic construct
  misc_feature 1..123: note = Synthetic
  source 1..123: mol_type = other DNA
gaagagtccaatggctgtttattctgcaagaaagaggtgataagtacctgtaacttactgacctgctggaagtagacaaagaagctagaaaattagattgtgttgacttctaattcctattgt

SEQ ID NO: 2022 - DNA, 123 bp, synthetic construct
  misc_feature 1..123: note = Synthetic
  source 1..123: mol_type = other DNA
ggacacccgcaaggccggcatcggtaaatggcacctttttctcttcctctggttgttatttgggggggagcgggctggggcggggcagggtattacggttggttgaggacagccccctaggcc

SEQ ID NO: 2023 - DNA, 123 bp, synthetic construct
  misc_feature 1..123: note = Synthetic
  source 1..123: mol_type = other DNA
ttttatcaaacaggagaccgcagctttaaagggggaaaatgcagacgttggataaaaacagcaagaaatagtcattttcattaataggtctcaaacagtttacgaaacagccattattatcta

SEQ ID NO: 2024 - DNA, 98 bp, synthetic construct
  misc_feature 1..98: note = Synthetic
  source 1..98: mol_type = other DNA
ataattcaagcttttcatgtagtcatgtagatcactagactccttggtgtactgacgtagcaatttaaaagcagatcatgtgtagtacatctagaagt

SEQ ID NO: 2025 - DNA, 123 bp, synthetic construct; identical to SEQ ID NO: 2013
  misc_feature 1..123: note = Synthetic
  source 1..123: mol_type = other DNA

SEQ ID NO: 2026 - DNA, 123 bp, synthetic construct
  misc_feature 1..123: note = Synthetic
  source 1..123: mol_type = other DNA
ttcccgggatgacttcaattctggtatcagtatttaaagtatcaccacttaatttttcctaggagccttgctgctgttctctgtttcttacgagtagcccgcctggccggactacttatttag

SEQ ID NO: 2027 - DNA, 123 bp, synthetic construct
  misc_feature 1..123: note = Synthetic
  source 1..123: mol_type = other DNA
ccagcagccggcacaggccctccctgcggggcgggaccgtcaggggggtgggtgctacgctggggcccacccaaccccgcgcgggacccaccggaagctgtggctgcaccaggcccggctcag

SEQ ID NO: 2028 - DNA, 123 bp, synthetic construct
  misc_feature 1..123: note = Synthetic
  source 1..123: mol_type = other DNA
tctgtattgttgaactctgggtcctaagagatgaggggttggcaaaggtaggtctgcaaacttcattttgttcattctatttcactctagtttattagaatccagttaaatacttggtaaaac

SEQ ID NO: 2029 - DNA, 123 bp, synthetic construct
  misc_feature 1..123: note = Synthetic
  source 1..123: mol_type = other DNA
gcagtgctaaacttctacctacacttttaggaaagaggtgaaggcattaacaaaaattttttttgagacttcaaatagcaaactctcacctaagttttggataaaaattaatcaccccgcgaa

SEQ ID NO: 2030 - DNA, 123 bp, synthetic construct
  misc_feature 1..123: note = Synthetic
  source 1..123: mol_type = other DNA
tttcatttaggtgtttgaagaatctgaaaagcacaggtattaatatgaccatactaacttgatacattaagttcaaaatttaagccatgttaaagaaacataaaaatacttttagataccatc

SEQ ID NO: 2031 - DNA, 123 bp, synthetic construct
  misc_feature 1..123: note = Synthetic
  source 1..123: mol_type = other DNA
ttattcatatataattccggtacctaggggcaaaaaggactggatgctgttaaataattagctgcatgccaactttgggtcccaaagccagagcctgtcgtccctgctccatcataacgccgg

SEQ ID NO: 2032 - DNA, 123 bp, synthetic construct
  misc_feature 1..123: note = Synthetic
  source 1..123: mol_type = other DNA
tgactgcagtgctaaacttctacctacacttttaggaaagaggtgaaggcattaacaaaaattttttttgagacttcaaatagcaaactctcacctaagttttggataaaaattaatcacccc

SEQ ID NO: 2033 - DNA, 123 bp, synthetic construct
  misc_feature 1..123: note = Synthetic
  source 1..123: mol_type = other DNA
aaggatcacaaaaacagaactttctgttaaagaaaacatagttaacatttttacactcagctctgtaaaaaatttaaattaaaaaagaaaaaacatctttgttttatacctttatttaacaag

SEQ ID NO: 2034 - DNA, 123 bp, synthetic construct
  misc_feature 1..123: note = Synthetic
  source 1..123: mol_type = other DNA
ctctgtttgaccaagcggccaaggtaaagatcctggaggtgatgcctgcggctttcctttcctcttctgccccactcgtggttctgttctgtcttcgctgtcccctctctcgaattgctctgt

SEQ ID NO: 2035 - DNA, 123 bp, synthetic construct
  misc_feature 1..123: note = Synthetic
  source 1..123: mol_type = other DNA
atgaataagccctcagatggcaggtgtgtgtgtgggggcggggcagatgtggctgtgggagagaccttgggggtggctggggtttccctgggcctttgggctctttccttagaaacttagcat

SEQ ID NO: 2036 - DNA, 123 bp, synthetic construct
  misc_feature 1..123: note = Synthetic
  source 1..123: mol_type = other DNA
ggcgagctgtttgcctgcagtatctggagaaattaaagacggacggacacaagaaaattaaaaagattacttgtgatcctgcaggtttcaagaaggactacctgaaaaagctcgagtatacct

SEQ ID NO: 2037 - DNA, 123 bp, synthetic construct
  misc_feature 1..123: note = Synthetic
  source 1..123: mol_type = other DNA
aacagatgaccaaactgaaatctgtaagcaggcgggtaacagctgcagcatagctaaccctaataaccatttataacgtatttgtagatatattaaacattaaaggctgtttttctggaggaa

SEQ ID NO: 2038 - DNA, 123 bp, synthetic construct
  misc_feature 1..123: note = Synthetic
  source 1..123: mol_type = other DNA
gaaggctgagtcagtgccattagctacaacgggagcagacaacatcaatggagttaattcatgcagggtgtacaagtgaccccttggagctgtgtcagtcaggtgaatgtacaatactggtgg

SEQ ID NO: 2039 - DNA, 123 bp, synthetic construct
  misc_feature 1..123: note = Synthetic
  source 1..123: mol_type = other DNA
ccctcttctccaggcaagaaaagctgagaacagaaaggtttagtgctgacttgggtgcttggggtgcgatgtgtggggagagggggagtcagcctctctcctcaagcacccactctggggtga

SEQ ID NO: 2040 - DNA, 123 bp, synthetic construct
  misc_feature 1..123: note = Synthetic
  source 1..123: mol_type = other DNA
taattagcatcttttccaagcaactgttaaatgtgaaagatcagatacaaatcatgctactttgtcaactttatgtatattaaaaactttacccaactttgaaatataatcaatacatctttg

SEQ ID NO: 2041 - DNA, 123 bp, synthetic construct
  misc_feature 1..123: note = Synthetic
  source 1..123: mol_type = other DNA
tcggcctggcggaagttttgcaggttgtgaagacccctagtctttcattctctccttgtcacagccttgtagggcgtgaaggggtcattgccccatttagggatgcgcacctcctgatttccc

SEQ ID NO: 2042 - DNA, 123 bp, synthetic construct
  misc_feature 1..123: note = Synthetic
  source 1..123: mol_type = other DNA
ctgctgggcctcgggccgctcacctgcggaaggggccgcgtaagaggggaaggtggtggggcgagcgcctgccaccaggggcttcccacctgccgccgaggacgctcctgccccgggctggaa

SEQ ID NO: 2043 - DNA, 123 bp, synthetic construct
  misc_feature 1..123: note = Synthetic
  source 1..123: mol_type = other DNA
ctgtttgaataaagagcgagtcggtatttatatttgtttttcttttgtcatgattatttgatttttaagttgctccagctaaggcatttttttgtattagtatttctattagggaacctttct

SEQ ID NO: 2044 - DNA, 123 bp, synthetic construct
  misc_feature 1..123: note = Synthetic
  source 1..123: mol_type = other DNA
gatatccagaagttcatggtgaggtaattacatttaatcaagatctcaaggttttttctttcatttgttgttcaccattgatcaagcttttgccctttgccgtgagaacaaaatattgaactg

SEQ ID NO: 2045 - DNA, 123 bp, synthetic construct
  misc_feature 1..123: note = Synthetic
  source 1..123: mol_type = other DNA
cagccggcccgtaagatccgcaggtgagccctgcgctcggggctgcccctggggctcgtgcccgcggctgcgccttggcttgcgggtggccgatgccagggcggggggcgctgtctgcaaccg

SEQ ID NO: 2046 - DNA, 123 bp, synthetic construct
  misc_feature 1..123: note = Synthetic
  source 1..123: mol_type = other DNA
ccacggttcggtaccacacgaaggtgcgcgccggccgcggcttcagcctggaggagctcagggtgagtactggcagcgctgcggtgtcaggaaggccccgaagtcccctctgttggcctcagt

SEQ ID NO: 2047 - DNA, 123 bp, synthetic construct
  misc_feature 1..123: note = Synthetic
  source 1..123: mol_type = other DNA
aatgagctccttgtggaggttccctaaggttaaaaaaagaattccacaaaatgtttgtaaaatccatccatactagtcaaataatctgactaagatgcagtgactatagaactaaaatcatca

SEQ ID NO: 2048 - DNA, 123 bp, synthetic construct
  misc_feature 1..123: note = Synthetic
  source 1..123: mol_type = other DNA
tggcctgggtgattcatggcttcctttgaaataaaacaacatcagttttcttaatgtgtgtcaaaagacaaagaaactctaagatttatgtttagttaagtttatactaggtattaaaaatat

SEQ ID NO: 2049 - DNA, 123 bp, synthetic construct
  misc_feature 1..123: note = Synthetic
  source 1..123: mol_type = other DNA
attggaacctcttgatttgcatgctagaaaataaaacgttttggttaatttttggtatcttatgccaagccccaagtaggaaatgggtatctacctcctgtccacttacatttcgtggggttc

SEQ ID NO: 2050 - DNA, 123 bp, synthetic construct
  misc_feature 1..123: note = Synthetic
  source 1..123: mol_type = other DNA
tccgccaacagcagctctggatgctgggaaagggaagagggcagtgacaaagggaaaaggaaagggaggagaaagggaaggagggaaaggacatcagaacatgagcaccggggaaagaacatc

SEQ ID NO: 2051 - DNA, 123 bp, synthetic construct
  misc_feature 1..123: note = Synthetic
  source 1..123: mol_type = other DNA
taggggcgggatgtcactccgaggtcagtgctgtgtaccctgataattgtcgggccctactcccttcccttttctcttgggctgcttatggacacgtttgtttaacatctttaagcctgaatt

SEQ ID NO: 2052 - DNA, 123 bp, synthetic construct; identical to SEQ ID NO: 1985
  misc_feature 1..123: note = Synthetic
  source 1..123: mol_type = other DNA

SEQ ID NO: 2053 - DNA, 123 bp, synthetic construct; identical to SEQ ID NO: 1986
  misc_feature 1..123: note = Synthetic
  source 1..123: mol_type = other DNA

SEQ ID NO: 2054 - DNA, 123 bp, synthetic construct
  misc_feature 1..123: note = Synthetic
  source 1..123: mol_type = other DNA
gaaggcatctcgaaagttgcaaggtgatccagatttgccgatgtcttttactttggccatagtggagtctgattctacaatagtctattataaacttactgatggatttatgctgccagaccc

SEQ ID NO: 2055 - DNA, 123 bp, synthetic construct
  misc_feature 1..123: note = Synthetic
  source 1..123: mol_type = other DNA
gcccggccagagaccactgtcatcttaagacagaacggggaaaacgtctaaggacgaaatcagcctctctgaatcgaggatgcttatatgctgcttttcccataggcaactctaactctaaac

SEQ ID NO: 2056 - DNA, 123 bp, synthetic construct
  misc_feature 1..123: note = Synthetic
  source 1..123: mol_type = other DNA
tgattctgtccttgtccttctatctgtttaaggaaagaaaaaaaggaagaaagtctaaaacattattatactttaaaacaagtttttattacagttaactttaaagtttacgaatgccatcat

SEQ ID NO: 2057 - DNA, 123 bp, synthetic construct
  misc_feature 1..123: note = Synthetic
  source 1..123: mol_type = other DNA
ctcagactctgtaggctgggcatctaaacagcaggaaagcacaagaaaatttacagtgacatgaattttttaaaatacatgtgtaactctaagcaattaacaacccaaatttccaaagatgag

SEQ ID NO: 2058 - DNA, 123 bp, synthetic construct
  misc_feature 1..123: note = Synthetic
  source 1..123: mol_type = other DNA
atcaccgtctcaaattttctgccctttaaagaataaggtgaagctaggtgtagatgactcgaggggatctggcctcttatgctgatcacctcaaggtctaggaggatcttaattgtcggattt

SEQ ID NO: 2059 - DNA, 123 bp, synthetic construct
  misc_feature 1..123: note = Synthetic
  source 1..123: mol_type = other DNA
aaattagtttcaactgcattctcctttaaaaaaaaaacatagtgaaagtcagttaacaagtttcttaatgccaaagcaatcattctatctgcataattttctaagaagctgaacaaaattcca

SEQ ID NO: 2060 - DNA, 123 bp, synthetic construct
  misc_feature 1..123: note = Synthetic
  source 1..123: mol_type = other DNA
gatagtctaggtctaggagctgactgagagtagaaaaaacaacattccccttcaatacactgttgaagtggggctgacaatttgcacacctagtttatcacgtgccacaggatgctgttattg

SEQ ID NO: 2061 - DNA, 123 bp, synthetic construct
  misc_feature 1..123: note = Synthetic
  source 1..123: mol_type = other DNA
aacctggtgaaaccccatctctactaaaaatacaaaaattagcctggtgtggtggcgtgcacctgtaatcccagctactagggaggctgagatgggaggatcgcttgaacctgggaggtggag

SEQ ID NO: 2062 - DNA, 123 bp, synthetic construct
  misc_feature 1..123: note = Synthetic
  source 1..123: mol_type = other DNA
agcacccacaggctaaactgaacctagaatgaaatataagtggagagagtatcattgaggataaaatttcattgtattactacttataatagggccggggactggtgtcatgaacacattcag

SEQ ID NO: 2063 - DNA, 123 bp, synthetic construct
  misc_feature 1..123: note = Synthetic
  source 1..123: mol_type = other DNA
ccatctaattggctttggtctaggtacttctgattggcttcccccgggcggtgggaggcgcggttttggggattgttcatcatggattggtgaatttgggctccttctcgaggtggtggccca

SEQ ID NO: 2064 - DNA, 123 bp, synthetic construct
  misc_feature 1..123: note = Synthetic
  source 1..123: mol_type = other DNA
gacagggacaggacgagcaggagctgtgaagggaccgacggacagatggacggacagatggggggacgacaggcagagagaggacgcacagacgacggacaacggacggacagacaggagaga

SEQ ID NO: 2065 - DNA, 123 bp, synthetic construct
  misc_feature 1..123: note = Synthetic
  source 1..123: mol_type = other DNA
ccaggcctgaccaacactgggatctataaacaacattttacaaacatttacatattttaagttaccattggaacacaagtctaccttagagtcactttggtagaagcctcaatttataatgaa

SEQ ID NO: 2066 - DNA, 123 bp, synthetic construct
  misc_feature 1..123: note = Synthetic
  source 1..123: mol_type = other DNA
gtggaaacctaactgtccaggaggtaagtttatgaccagtaacatgagttttatattaaaatgcatggtgtgtcttctcttactacagagtacagttgtgaatttggctccgcgaagtattat

SEQ ID NO: 2067 - DNA, 123 bp, synthetic construct
  misc_feature 1..123: note = Synthetic
  source 1..123: mol_type = other DNA
cctcactcccctgtccccttgctccccgcctccaccctccacgccccaagccccgccccccacctgcctgctccctgtgccccctccacctgcctatcctgtgccatcctcctccttgcacgc

SEQ ID NO: 2068 - DNA, 123 bp, synthetic construct
  misc_feature 1..123: note = Synthetic
  source 1..123: mol_type = other DNA
cagggctgcgcccagcgcttccggtgagtccgtggacggcggggatggggtccggcggcctccgggcccctctcaagccgcctcctccccctgcagggagcggcaggcgggcgggggcgcggc

SEQ ID NO: 2069 - DNA, 123 bp, synthetic construct
  misc_feature 1..123: note = Synthetic
  source 1..123: mol_type = other DNA
aaagaaatgcacaatctcgcaaggtaaagaaaatattgtgctagacgtaatcttgggtaaatacctttttgcattaggataaaaaaatccatgctttcttttacattcatttatagaaataat

SEQ ID NO: 2070 - DNA, 123 bp, synthetic construct
  misc_feature 1..123: note = Synthetic
  source 1..123: mol_type = other DNA
gcaactccagcccccgaacccaggtgagttgtctctgctttgtctccaaatcctgcaggcgggtccctggtcatcgaggggtaggacgaggtggccttgcaggggggagagcctgccttctct

SEQ ID NO: 2071 - DNA, 115 bp, synthetic construct
  misc_feature 1..115: note = Synthetic
  source 1..115: mol_type = other DNA
tggagtgcactgaaggtagtgtaagtctttggtttgaaaccaaatctcctgcatgctagttactcttgggattggtggagtgcttttagcctactgagtgcagtgatggaaaaaa

SEQ ID NO: 2072 - DNA, 123 bp, synthetic construct
  misc_feature 1..123: note = Synthetic
  source 1..123: mol_type = other DNA
gagcgctacctgttcgtgtacaggtgggtggtctagaaagccaggaagcccctccctcacctgggagggccccaacagagcagggaagtagtttgtcctattagtttgtcctatggcaagaac

SEQ ID NO: 2073 - DNA, 123 bp, synthetic construct
  misc_feature 1..123: note = Synthetic
  source 1..123: mol_type = other DNA
cagcagccacctcgggagccatcctagaggtggggtcacagatgggatggccgggtgccctgctctgtggcccctacccctccgccccaggcgcagcctcaccagtagggagtcccaatgaaa

SEQ ID NO: 2074 - DNA, 123 bp, synthetic construct
  misc_feature 1..123: note = Synthetic
  source 1..123: mol_type = other DNA
tgcatcagtctcagaccatggaggtactgtatcatctgccctttctttgttttctttgtgcaaatgatggggaatggtaaagcaattctctcctgtgtggattgttcacatgacaatcacaga

SEQ ID NO: 2075 - DNA, 123 bp, synthetic construct
  misc_feature 1..123: note = Synthetic
  source 1..123: mol_type = other DNA
agtaatgcagtggacttgtagctgtcatttagcagcttttgttttcaggttcagagagctatattctgaaataccgagacttcttgaagactgacctctggagaagtaggcatattataaagt

SEQ ID NO: 2076 - DNA, 123 bp, synthetic construct
  misc_feature 1..123: note = Synthetic
  source 1..123: mol_type = other DNA
caccatcacagcgaacacctcaggtctgactatgctgctctagtagtgtcttcagttatagataatgaaatggaaactcaaaactttaatgtagctcttttattttgtgccagatattatttg

SEQ ID NO: 2077 - DNA, 123 bp, synthetic construct
  misc_feature 1..123: note = Synthetic
  source 1..123: mol_type = other DNA
tgattattaaattgaaaaattctctgtaaaataaaagagcagagagatctcctttttcacaagaggggaacttagacatgctgagaggcccatcaatggggactcatgggcctttgtttcctg

SEQ ID NO: 2078 - DNA, 123 bp, synthetic construct; identical to SEQ ID NO: 2042
  misc_feature 1..123: note = Synthetic
  source 1..123: mol_type = other DNA

SEQ ID NO: 2079 - DNA, 123 bp, synthetic construct
  misc_feature 1..123: note = Synthetic
  source 1..123: mol_type = other DNA
ctttggacattttttgttcactagtgagtatctgtattttttatttctctatgtactaaaaaaagcatttctctacataatgaactatttttttttctaggtggagtaatgtatataacgtaa

SEQ ID NO: 2080 - DNA, 1765 bp, synthetic construct
  source 1..1765: mol_type = other DNA
gctgttagtgtcacaccaattcgggacacaaaatggctaacactggaagtatgtagagagttccagagggggacttgctcacggccagacacggaatgtaaatttgcacatccttcgaaaagctgccaagttgaaaatggacgagtaatcgcctgctttgattcattgaaaggccgttgctccagggagaactgcaaatatcttcatccacccccacatttaaaaacgcagttggagataaatggacgcaataacttgattcagcagaagaacatggccatgttggcccagcaaatgcaactagccaatgccatgatgcctggtgccccattacaacccgtgccaatgttttcagttgcaccaagcttagccaccaatgcatcagcagccgcctttaatccctatctgggacctgtttctccaagcctggtcccggcagagatcttgccgactgcaccaatgttggttacagggaatccgggtgtccctgtacctgcagctgctgcagctgctgcacagaaattaatgcgaacagacagacttgaggtatgtcgagagtaccaacgtggcaattgcaaccgaggagaaaatgattgtcggtttgctcatcctgctgacagcacaatgattgacaccaatgacaacacagtcactgtgtgtatggattacatcaaagggagatgctctcgggaaaagtgcaaatactttcatccccctgcacatttgcaagccaagatcaaggctgcccaataccaggtcaaccaggctgcagctgcacaggctgcagccaccgcagctgccatggtgagtagagatatcagctctctccttgttagcagtcagaaaagcaaagtgagcaactatatctgactacaagctattcatttagtaacctttttaaaaaaattgctgaagatatgtttgttcaggtatcccagaccacgagagagatcttttctgtgtttatggatacttgagcaaaaatacagaaggcagactctctcctcctctcttcctttcactcttttttttttctgttagagtatcttgtttgtaattaactacaaagaggagttatcctcccaataacaactcagtagtgcctttattgtgcatgcttagtcttgttattcgttgtatatggcattccctaggtcgactaccgaagcttcatgcactttcattcattttagactcagtcggctgtcaaatcactgaagcgacccctcgaggcaacctttgacctggtacgttaaaacataccagacggaaacgtctggagaggtgaagaatacgaccacctaacgtaccagtgacctttcaccttttagcttggcatgtagctttattgtatgcttgcttgctcatgcttcctaacaattttagccttcgactgatttttcttttttctttttctctttttactggtatttgttttttatactcattcactaaacagggaattcctcaagctgtacttcccccattaccaaagaggcctgctcttgaaaaaaccaacggtgccaccgcagtctttaacactggtattttccaataccaacaagctctagccaacatgcagttacaacagcatacagcatttctcccaccagttcccatggtgcacggtgctacgccagccactgtgtccgcagcaacaacatctgccacaagtgttcccttcgctgcaacagccacagccaaccagatacccataatatctgccgaacatctgactagccacaagtatgttacccagatgtag

SEQ ID NO: 2081 - DNA, 804 bp, synthetic construct
  source 1..804: mol_type = other DNA
gctgttagtgtcacaccaattcgggacacaaaatggctaacactggaagtatgtagagagttccagagggggacttgctcacggccagacacggaatgtaaatttgcacatccttcgaaaagctgccaagttgaaaatggacgagtaatcgcctgctttgattcattgaaaggccgttgctccagggagaactgcaaatatcttcatccacccccacatttaaaaacgcagttggagataaatggacgcaataacttgattcagcagaagaacatggccatgttggcccagcaaatgcaactagccaatgccatgatgcctggtgccccattacaacccgtgccaatgttttcagttgcaccaagcttagccaccaatgcatcagcagccgcctttaatccctatctgggacctgtttctccaagcctggtcccggcagagatcttgccgactgcaccaatgttggttacagggaatccgggtgtccctgtacctgcagctgctgcagctgctgcacagaaattaatgcgaacagacagacttgaggtatgtcgagagtaccaacgtggcaattgcaaccgaggagaaaatgattgtcggtttgctcatcctgctgacagcacaatgattgacaccaatgacaacacagtcactgtgtgtatggattacatcaaagggagatgctctcgggaaaagtgcaaatactttcatccccctgcacatttgcaagccaagatcaaggctgcccaataccaggtcaaccaggctgcagctgcacaggctgcagccaccgcagctgccatg

SEQ ID NO: 2082 - DNA, 365 bp, synthetic construct
  source 1..365: mol_type = other DNA
gtgagtagagatatcagctctctccttgttagcagtcagaaaagcaaagtgagcaactatatctgactacaagctattcatttagtaacctttttaaaaaaattgctgaagatatgtttgttcaggtatcccagaccacgagagagatcttttctgtgtttatggatacttgagcaaaaatacagaaggcagactctctcctcctctcttcctttcactcttttttttttctgttagagtatcttgtttgtaattaactacaaagaggagttatcctcccaataacaactcagtagtgcctttattgtgcatgcttagtcttgttattcgttgtatatggcattccctaggtcgactaccgaagc

SEQ ID NO: 2083 - DNA, 24 bp, synthetic construct
  source 1..24: mol_type = other DNA
ttcatgcactttcattcattttag

SEQ ID NO: 2084 - DNA, 54 bp, synthetic construct
  source 1..54: mol_type = other DNA
actcagtcggctgtcaaatcactgaagcgacccctcgaggcaacctttgacctg

SEQ ID NO: 2085 - skipped

SEQ ID NO: 2086 - DNA, 51 bp, synthetic construct
  source 1..51: mol_type = other DNA
taaaacataccagacggaaacgtctggagaggtgaagaatacgaccaccta

SEQ ID NO: 2087 - skipped

SEQ ID NO: 2088 - DNA, 146 bp, synthetic construct
  source 1..146: mol_type = other DNA
tgacctttcaccttttagcttggcatgtagctttattgtatgcttgcttgctcatgcttcctaacaattttagccttcgactgatttttcttttttctttttctctttttactggtatttgttttttatactcattcactaaacag

SEQ ID NO: 2089 - DNA, 306 bp, synthetic construct
  source 1..306: mol_type = other DNA
ggaattcctcaagctgtacttcccccattaccaaagaggcctgctcttgaaaaaaccaacggtgccaccgcagtctttaacactggtattttccaataccaacaagctctagccaacatgcagttacaacagcatacagcatttctcccaccagttcccatggtgcacggtgctacgccagccactgtgtccgcagcaacaacatctgccacaagtgttcccttcgctgcaacagccacagccaaccagatacccataatatctgccgaacatctgactagccacaagtatgttacccagatgtag

SEQ ID NO: 2090 - DNA, 27 bp, synthetic construct
  source 1..27: mol_type = other DNA
tacccatacgacgtaccagattacgct

SEQ ID NO: 2091 - DNA, 769 bp, synthetic construct
  source 1..769: mol_type = other DNA
tacccatacgacgtaccagattacgctatggtgagtagagatatcagctctctccttgttagcagtcagaaaatgcaaacgtggcaactatatctgactacaatgctattcatttgtaacctttttaaaaaaattgctgaacgatatgtttgttcggtatcccgaccacggacggatcttttctgtgtttatggatacttggcaaaaatacgaacggcgactctctcctcctctcttcctttcactcttttttttttcttttgacgtatcttgtttgtaattaactacaaatgggacgttatcctcccaataacaactcgtacgtgcctttattgtgcatgcttgtcttgttattcgttgtatatgctgatttatctttaatctttatctctatttcagacttacctgtaaaacataccatccgtaaccggatggagaggtgaagaatacgaccacctacaggtaagttggatcctttcaccttttagcttggcatgtagctttattgtatgcttgcttgctcatgcttcctaacaattttagccttcgactgatttttcttttttctttttctctttttcaggggcccaagccagccgtggagtctgagttttctaaggtactcaagaagcactttccgggcgagcgatttaggtctagctacatgaagcggggtggtaaaatcttggcagcccagggtgaagaagcggtcgtcgcgtatctgcaaggcaagtccgaggaggaacccccgaattttcagccgccggcg

SEQ ID NO: 2092 - DNA, 30 bp, synthetic construct
  source 1..30: mol_type = other DNA
tacccatacgacgtaccagattacgctatg

SEQ ID NO: 2093 - DNA, 369 bp, synthetic construct
  source 1..369: mol_type = other DNA
gtgagtagagatatcagctctctccttgttagcagtcagaaaatgcaaacgtggcaactatatctgactacaatgctattcatttgtaacctttttaaaaaaattgctgaacgatatgtttgttcggtatcccgaccacggacggatcttttctgtgtttatggatacttggcaaaaatacgaacggcgactctctcctcctctcttcctttcactcttttttttttcttttgacgtatcttgtttgtaattaactacaaatgggacgttatcctcccaataacaactcgtacgtgcctttattgtgcatgcttgtcttgttattcgttgtatatgctgatttatctttaatctttatctctatttcag

SEQ ID NO: 2094 - DNA, 63 bp, synthetic construct
  source 1..63: mol_type = other DNA
acttacctgtaaaacataccatccgtaaccggatggagaggtgaagaatacgaccacctacag

SEQ ID NO: 2095 - DNA, 51 bp, synthetic construct
  source 1..51: mol_type = other DNA
taaaacataccatccgtaaccggatggagaggtgaagaatacgaccaccta

SEQ ID NO: 2096 - DNA, 121 bp, synthetic construct
  source 1..121: mol_type = other DNA
gtaagttggatcctttcaccttttagcttggcatgtagctttattgtatgcttgcttgctcatgcttcctaacaattttagccttcgactgatttttcttttttctttttctctttttcag

SEQ ID NO: 2097 - DNA, 186 bp, synthetic construct
  source 1..186: mol_type = other DNA
gggcccaagccagccgtggagtctgagttttctaaggtactcaagaagcactttccgggcgagcgatttaggtctagctacatgaagcggggtggtaaaatcttggcagcccagggtgaagaagcggtcgtcgcgtatctgcaaggcaagtccgaggaggaacccccgaattttcagccgccggcg

SEQ ID NO: 2098 - DNA, 183 bp, synthetic construct
  source 1..183: mol_type = other DNA
cccaagccagccgtggagtctgagttttctaaggtactcaagaagcactttccgggcgagcgatttaggtctagctacatgaagcggggtggtaaaatcttggcagcccagggtgaagaagcggtcgtcgcgtatctgcaaggcaagtccgaggaggaacccccgaattttcagccgccggcg

SEQ ID NO: 2099 - DNA, 769 bp, synthetic construct
  source 1..769: mol_type = other DNA
tacccatacgacgtaccagattacgctatggtgagtagagatatcagctctctccttgttagcagtcagaaaatgcaaacgtggcaactatatctgactacaatgctattcatttgtaacctttttaaaaaaattgctgaacgatatgtttgttcggtatcccgaccacggacggatcttttctgtgtttatggatacttggcaaaaatacgaacggcgactctctcctcctctcttcctttcactcttttttttttcttttgacgtatcttgtttgtaattaactacaaatgggacgttatcctcccaataacaactcgtacgtgcctttattgtgcatgcttgtcttgttattcgttgtatatgctgatttatctttaatctttatctctatttcagacgtaccagtaaaacataccatccgtaaccggatggagaggtgaagaatacgaccacctactggtacgttggatcctttcaccttttagcttggcatgtagctttattgtatgcttgcttgctcatgcttcctaacaattttagccttcgactgatttttcttttttctttttctctttttcaggggcccaagccagccgtggagtctgagttttctaaggtactcaagaagcactttccgggcgagcgatttaggtctagctacatgaagcggggtggtaaaatcttggcagcccagggtgaagaagcggtcgtcgcgtatctgcaaggcaagtccgaggaggaacccccgaattttcagccgccggcg

SEQ ID NO: 2100 - DNA, 63 bp, synthetic construct
  source 1..63: mol_type = other DNA
acgtaccagtaaaacataccatccgtaaccggatggagaggtgaagaatacgaccacctactg

SEQ ID NO: 2101 - DNA, 121 bp, synthetic construct
  source 1..121: mol_type = other DNA
gtacgttggatcctttcaccttttagcttggcatgtagctttattgtatgcttgcttgctcatgcttcctaacaattttagccttcgactgatttttcttttttctttttctctttttcag

SEQ ID NO: 2102 - DNA, 769 bp, synthetic construct
  source 1..769: mol_type = other DNA
tacccatacgacgtaccagattacgctatggtgagtagagatatcagctctctccttgttagcagtcagaaaatgcaaacgtggcaactatatctgactacaatgctattcatttgtaacctttttaaaaaaattgctgaacgatatgtttgttcggtatcccgaccacggacggatcttttctgtgtttatggatacttggcaaaaatacgaacggcgactctctcctcctctcttcctttcactcttttttttttcttttgacgtatcttgtttgtaattaactacaaatgggacgttatcctcccaataacaactcgtacgtgcctttattgtgcatgcttgtcttgttattcgttgtatatgctgatttatctttaatctttatctctatttcagactcacatctaaaacataccatccgtaaccggatggagaggtgaagaatacgaccacctagatgtgagttggatcctttcaccttttagcttggcatgtagctttattgtatgcttgcttgctcatgcttcctaacaattttagccttcgactgatttttcttttttctttttctctttttcaggggcccaagccagccgtggagtctgagttttctaaggtactcaagaagcactttccgggcgagcgatttaggtctagctacatgaagcggggtggtaaaatcttggcagcccagggtgaagaagcggtcgtcgcgtatctgcaaggcaagtccgaggaggaacccccgaattttcagccgccggcg

SEQ ID NO: 2103 - DNA, 63 bp, synthetic construct
  source 1..63: mol_type = other DNA
actcacatctaaaacataccatccgtaaccggatggagaggtgaagaatacgaccacctagat

SEQ ID NO: 2104 - DNA, 121 bp, synthetic construct
  source 1..121: mol_type = other DNA
gtgagttggatcctttcaccttttagcttggcatgtagctttattgtatgcttgcttgctcatgcttcctaacaattttagccttcgactgatttttcttttttctttttctctttttcag

SEQ ID NO: 2105 - DNA, 769 bp, synthetic construct
  source 1..769: mol_type = other DNA
tacccatacgacgtaccagattacgctatggtgagtagagatatcagctctctccttgttagcagtcagaaaatgcaaacgtggcaactatatctgactacaatgctattcatttgtaacctttttaaaaaaattgctgaacgatatgtttgttcggtatcccgaccacggacggatcttttctgtgtttatggatacttggcaaaaatacgaacggcgactctctcctcctctcttcctttcactcttttttttttcttttgacgtatcttgtttgtaattaactacaaatgggacgttatcctcccaataacaactcgtacgtgcctttattgtgcatgcttgtcttgttattcgttgtatatgctgatttatctttaatctttatctctatttcagtagtaccagtaaaacataccatccgtaaccggatggagaggtgaagaatacgaccacctactggtactatggatcctttcaccttttagcttggcatgtagctttattgtatgcttgcttgctcatgcttcctaacaattttagccttcgactgatttttcttttttctttttctctttttcaggggcccaagccagccgtggagtctgagttttctaaggtactcaagaagcactttccgggcgagcgatttaggtctagctacatgaagcggggtggtaaaatcttggcagcccagggtgaagaagcggtcgtcgcgtatctgcaaggcaagtccgaggaggaacccccgaattttcagccgccggcg

SEQ ID NO: 2106 - DNA, 63 bp, synthetic construct
  source 1..63: mol_type = other DNA
tagtaccagtaaaacataccatccgtaaccggatggagaggtgaagaatacgaccacctactg

SEQ ID NO: 2107 - DNA, 121 bp, synthetic construct
  source 1..121: mol_type = other DNA
gtactatggatcctttcaccttttagcttggcatgtagctttattgtatgcttgcttgctcatgcttcctaacaattttagccttcgactgatttttcttttttctttttctctttttcag

SEQ ID NO: 2108 - DNA, 760 bp, synthetic construct
  source 1..760: mol_type = other DNA
tacccatacgacgtaccagattacgctatggtgagtagagatatcagctctctccttgttagcagtcagaaaatgcaaacgtggcaactatatctgactacaatgctattcatttgtaacctttttaaaaaaattgctgaacgatatgtttgttcggtatcccgaccacggacggatcttttctgtgtttatggatacttggcaaaaatacgaacggcgactctctcctcctctcttcctttcactcttttttttttcttttgacgtatcttgtttgtaattaactacaaatgggacgttatcctcccaataacaactcgtacgtgcctttattgtgcatgcttgtcttgttattcgttgtatatgttcatgcactttcattcattttagacttacctgtaaaacataccatccgtaaccggatggagaggtgaagaatacgaccacctacaggtaagttggatcctttcaccttttagcttggcatgtagctttattgtatgcttgcttgctcatgcttcctaacaattttagccttcgactgatttttcttttttctttttctctttttcaggggcccaagccagccgtggagtctgagttttctaaggtactcaagaagcactttccgggcgagcgatttaggtctagctacatgaagcggggtggtaaaatcttggcagcccagggtgaagaagcggtcgtcgcgtatctgcaaggcaagtccgaggaggaacccccgaattttcagccgccggcg

SEQ ID NO: 2109 - DNA, 760 bp, synthetic construct
  source 1..760: mol_type = other DNA
tacccatacgacgtaccagattacgctatggtgagtagagatatcagctctctccttgttagcagtcagaaaatgcaaacgtggcaactatatctgactacaatgctattcatttgtaacctttttaaaaaaattgctgaacgatatgtttgttcggtatcccgaccacggacggatcttttctgtgtttatggatacttggcaaaaatacgaacggcgactctctcctcctctcttcctttcactcttttttttttcttttgacgtatcttgtttgtaattaactacaaatgggacgttatcctcccaataacaactcgtacgtgcctttattgtgcatgcttgtcttgttattcgttgtatatgttcatgcactttcattcattttagacgtaccagtaaaacataccatccgtaaccggatggagaggtgaagaatacgaccacctactggtacgttggatcctttcaccttttagcttggcatgtagctttattgtatgcttgcttgctcatgcttcctaacaattttagccttcgactgatttttcttttttctttttctctttttcaggggcccaagccagccgtggagtctgagttttctaaggtactcaagaagcactttccgggcgagcgatttaggtctagctacatgaagcggggtggtaaaatcttggcagcccagggtgaagaagcggtcgtcgcgtatctgcaaggcaagtccgaggaggaacccccgaattttcagccgccggcg

SEQ ID NO: 2110 - DNA, 760 bp, synthetic construct
  source 1..760: mol_type = other DNA
tacccatacgacgtaccagattacgctatggtgagtagagatatcagctctctccttgttagcagtcagaaaatgcaaacgtggcaactatatctgactacaatgctattcatttgtaacctttttaaaaaaattgctgaacgatatgtttgttcggtatcccgaccacggacggatcttttctgtgtttatggatacttggcaaaaatacgaacggcgactctctcctcctctcttcctttcactcttttttttttcttttgacgtatcttgtttgtaattaactacaaatgggacgttatcctcccaataacaactcgtacgtgcctttattgtgcatgcttgtcttgttattcgttgtatatgttcatgcactttcattcattttagactcacatctaaaacataccatccgtaaccggatggagaggtgaagaatacgaccacctagatgtgagttggatcctttcaccttttagcttggcatgtagctttattgtatgcttgcttgctcatgcttcctaacaattttagccttcgactgatttttcttttttctttttctctttttcaggggcccaagccagccgtggagtctgagttttctaaggtactcaagaagcactttccgggcgagcgatttaggtctagctacatgaagcggggtggtaaaatcttggcagcccagggtgaagaagcggtcgtcgcgtatctgcaaggcaagtccgaggaggaacccccgaattttcagccgccggcg

SEQ ID NO: 2111 - DNA, 760 bp, synthetic construct
  source 1..760: mol_type = other DNA
tacccatacgacgtaccagattacgctatggtgagtagagatatcagctctctccttgttagcagtcagaaaatgcaaacgtggcaactatatctgactacaatgctattcatttgtaacctttttaaaaaaattgctgaacgatatgtttgttcggtatcccgaccacggacggatcttttctgtgtttatggatacttggcaaaaatacgaacggcgactctctcctcctctcttcctttcactcttttttttttcttttgacgtatcttgtttgtaattaactacaaatgggacgttatcctcccaataacaactcgtacgtgcctttattgtgcatgcttgtcttgttattcgttgtatatgttcatgcactttcattcattttagtagtaccagtaaaacataccatccgtaaccggatggagaggtgaagaatacgaccacctactggtactatggatcctttcaccttttagcttggcatgtagctttattgtatgcttgcttgctcatgcttcctaacaattttagccttcgactgatttttcttttttctttttctctttttcaggggcccaagccagccgtggagtctgagttttctaaggtactcaagaagcactttccgggcgagcgatttaggtctagctacatgaagcggggtggtaaaatcttggcagcccagggtgaagaagcggtcgtcgcgtatctgcaaggcaagtccgaggaggaacccccgaattttcagccgccggcg

SEQ ID NO: 2112 - DNA, 773 bp, synthetic construct
  source 1..773: mol_type = other DNA
tacccatacgacgtaccagattacgctatggtgagtagagatatcagctctctccttgttagcagtcagaaaatgcaaacgtggcaactatatctgactacaatgctattcatttgtaacctttttaaaaaaattgctgaacgatatgtttgttcggtatcccgaccacggacggatcttttctgtgtttatggatacttggcaaaaatacgaacggcgactctctcctcctctcttcctttcactcttttttttttcttttgacgtatcttgtttgtaattaactacaaatgggacgttatcctcccaataacaactcgtacgtgcctttattgtgcatgcttgtcttgttattcgttgtatatggaattcctgatttatctttaatctttatctctttttcagtacctgtaaaacataccatccgtaaccggatggagaggtgaagaatacgaccacctacaggtactgctggatcctttcaccttttagcttggcatgtagctttattgtatgcttgcttgctcatgcttcctaacaattttagccttcgactgatttttcttttttctttttctctttttcaggggcccaagccagccgtggagtctgagttttctaaggtactcaagaagcactttccgggcgagcgatttaggtctagctacatgaagcggggtggtaaaatcttggcagcccagggtgaagaagcggtcgtcgcgtatctgcaaggcaagtccgaggaggaacccccgaattttcagccgccggcg

SEQ ID NO: 2113 - DNA, 375 bp, synthetic construct
  source 1..375: mol_type = other DNA
gtgagtagagatatcagctctctccttgttagcagtcagaaaatgcaaacgtggcaactatatctgactacaatgctattcatttgtaacctttttaaaaaaattgctgaacgatatgtttgttcggtatcccgaccacggacggatcttttctgtgtttatggatacttggcaaaaatacgaacggcgactctctcctcctctcttcctttcactcttttttttttcttttgacgtatcttgtttgtaattaactacaaatgggacgttatcctcccaataacaactcgtacgtgcctttattgtgcatgcttgtcttgttattcgttgtatatggaattcctgatttatctttaatctttatctctttttcag

SEQ ID NO: 2114 - DNA, 60 bp, synthetic construct
  source 1..60: mol_type = other DNA
tacctgtaaaacataccatccgtaaccggatggagaggtgaagaatacgaccacctacag

SEQ ID NO: 2115 - DNA, 122 bp, synthetic construct
  source 1..122: mol_type = other DNA
gtactgctggatcctttcaccttttagcttggcatgtagctttattgtatgcttgcttgctcatgcttcctaacaattttagccttcgactgatttttcttttttctttttctctttttcag

SEQ ID NO: 2116 - DNA, 773 bp, synthetic construct
  source 1..773: mol_type = other DNA
tacccatacgacgtaccagattacgctatggtgagtagagatatcagctctctccttgttagcagtcagaaaatgcaaacgtggcaactatatctgactacaatgctattcatttgtaacctttttaaaaaaattgctgaacgatatgtttgttcggtatcccgaccacggacggatcttttctgtgtttatggatacttggcaaaaatacgaacggcgactctctcctcctctcttcctttcactcttttttttttcttttgacgtatcttgtttgtaattaactacaaatgggacgttatcctcccaataacaactcgtacgtgcctttattgtgcatgcttgtcttgttattcgttgtatatggaattcctgatttatctttaatctttatctctttttcagtacctgtaaaacataccatccgtaaccggatggagaggtgaagaatacgaccacctacaggtactggtggatcctttcaccttttagcttggcatgtagctttattgtatgcttgcttgctcatgcttcctaacaattttagccttcgactgatttttcttttttctttttctctttttcaggggcccaagccagccgtggagtctgagttttctaaggtactcaagaagcactttccgggcgagcgatttaggtctagctacatgaagcggggtggtaaaatcttggcagcccagggtgaagaagcggtcgtcgcgtatctgcaaggcaagtccgaggaggaacccccgaattttcagccgccggcg

SEQ ID NO: 2117 - DNA, 122 bp, synthetic construct
  source 1..122: mol_type = other DNA
gtactggtggatcctttcaccttttagcttggcatgtagctttattgtatgcttgcttgctcatgcttcctaacaattttagccttcgactgatttttcttttttctttttctctttttcag

SEQ ID NO: 2118 - DNA, 773 bp, synthetic construct
  source 1..773: mol_type = other DNA
tacccatacgacgtaccagattacgctatggtgagtagagatatcagctctctccttgttagcagtcagaaaatgcaaacgtggcaactatatctgactacaatgctattcatttgtaacctttttaaaaaaattgctgaacgatatgtttgttcggtatcccgaccacggacggatcttttctgtgtttatggatacttggcaaaaatacgaacggcgactctctcctcctctcttcctttcactcttttttttttcttttgacgtatcttgtttgtaattaactacaaatgggacgttatcctcccaataacaactcgtacgtgcctttattgtgcatgcttgtcttgttattcgttgtatatggaattcctgatttatctttaatctttatctctttttcagtacctgtaaaacataccatccgtaaccggatggagaggtgaagaatacgaccacctacaggtactgatggatcctttcaccttttagcttggcatgtagctttattgtatgcttgcttgctcatgcttcctaacaattttagccttcgactgatttttcttttttctttttctctttttcaggggcccaagccagccgtggagtctgagttttctaaggtactcaagaagcactttccgggcgagcgatttaggtctagctacatgaagcggggtggtaaaatcttggcagcccagggtgaagaagcggtcgtcgcgtatctgcaaggcaagtccgaggaggaacccccgaattttcagccgccggcg

SEQ ID NO: 2119 - skipped

SEQ ID NO: 2120 - DNA, 773 bp, synthetic construct
  source 1..773: mol_type = other DNA
tacccatacgacgtaccagattacgctatggtgagtagagatatcagctctctccttgttagcagtcagaaaatgcaaacgtggcaactatatctgactacaatgctattcatttgtaacctttttaaaaaaattgctgaacgatatgtttgttcggtatcccgaccacggacggatcttttctgtgtttatggatacttggcaaaaatacgaacggcgactctctcctcctctcttcctttcactcttttttttttcttttgacgtatcttgtttgtaattaactacaaatgggacgttatcctcccaataacaactcgtacgtgcctttattgtgcatgcttgtcttgttattcgttgtatatggaattcctgatttatctttaatctttatctcttttttagtacctgtaaaacataccatccgtaaccggatggagaggtgaagaatacgaccacctacaggtactgatggatcctttcaccttttagcttggcatgtagctttattgtatgcttgcttgctcatgcttcctaacaattttagccttcgactgatttttcttttttctttttctctttttcaggggcccaagccagccgtggagtctgagttttctaaggtactcaagaagcactttccgggcgagcgatttaggtctagctacatgaagcggggtggtaaaatcttggcagcccagggtgaagaagcggtcgtcgcgtatctgcaaggcaagtccgaggaggaacccccgaattttcagccgccggcg

SEQ ID NO: 2121 - DNA, 375 bp, synthetic construct
  source 1..375: mol_type = other DNA
gtgagtagagatatcagctctctccttgttagcagtcagaaaatgcaaacgtggcaactatatctgactacaatgctattcatttgtaacctttttaaaaaaattgctgaacgatatgtttgttcggtatcccgaccacggacggatcttttctgtgtttatggatacttggcaaaaatacgaacggcgactctctcctcctctcttcctttcactcttttttttttcttttgacgtatcttgtttgtaattaactacaaatgggacgttatcctcccaataacaactcgtacgtgcctttattgtgcatgcttgtcttgttattcgttgtatatggaattcctgatttatctttaatctttatctcttttttag

SEQ ID NO: 2122 - DNA, 51 bp, synthetic construct; identical to SEQ ID NO: 2095
  source 1..51: mol_type = other DNA

SEQ ID NO: 2123 - DNA, 773 bp, synthetic construct
  source 1..773: mol_type = other DNA
tacccatacgacgtaccagattacgctatggtgagtagagatatcagctctctccttgttagcagtcagaaaatgcaaacgtggcaactatatctgactacaatgctattcatttgtaacctttttaaaaaaattgctgaacgatatgtttgttcggtatcccgaccacggacggatcttttctgtgtttatggatacttggcaaaaatacgaacggcgactctctcctcctctcttcctttcactcttttttttttcttttgacgtatcttgtttgtaattaactacaaatgggacgttatcctcccaataacaactcgtacgtgcctttattgtgcatgcttgtcttgttattcgttgtatatggaattcctgatttatctttaatctttatctcttttttagtacctgtaaaacataccatccgtaaccggatggagaggtgaagaatacgaccacctacaggtactgctggatcctttcaccttttagcttggcatgtagctttattgtatgcttgcttgctcatgcttcctaacaattttagccttcgactgatttttcttttttctttttctctttttcaggggcccaagccagccgtggagtctgagttttctaaggtactcaagaagcactttccgggcgagcgatttaggtctagctacatgaagcggggtggtaaaatcttggcagcccagggtgaagaagcggtcgtcgcgtatctgcaaggcaagtccgaggaggaacccccgaattttcagccgccggcg

SEQ ID NO: 2124-2126 - skipped (3 entries)

SEQ ID NO: 2127 - DNA, 375 bp, synthetic construct; identical to SEQ ID NO: 2121
  source 1..375: mol_type = other DNA

SEQ ID NO: 2128 - DNA, 773 bp, synthetic construct
  source 1..773: mol_type = other DNA
tacccatacgacgtaccagattacgctatggtgagtagagatatcagctctctccttgttagcagtcagaaaatgcaaacgtggcaactatatctgactacaatgctattcatttgtaacctttttaaaaaaattgctgaacgatatgtttgttcggtatcccgaccacggacggatcttttctgtgtttatggatacttggcaaaaatacgaacggcgactctctcctcctctcttcctttcactcttttttttttcttttgacgtatcttgtttgtaattaactacaaatgggacgttatcctcccaataacaactcgtacgtgcctttattgtgcatgcttgtcttgttattcgttgtatatggaattcctgatttatctttaatctttatctcttttttagtacctgtaaaacataccatccgtaaccggatggagaggtgaagaatacgaccacctacaggtactgttggatcctttcaccttttagcttggcatgtagctttattgtatgcttgcttgctcatgcttcctaacaattttagccttcgactgatttttcttttttctttttctctttttcaggggcccaagccagccgtggagtctgagttttctaaggtactcaagaagcactttccgggcgagcgatttaggtctagctacatgaagcggggtggtaaaatcttggcagcccagggtgaagaagcggtcgtcgcgtatctgcaaggcaagtccgaggaggaacccccgaattttcagccgccggcg

SEQ ID NO: 2129 - DNA, 375 bp, synthetic construct; identical to SEQ ID NO: 2121
  source 1..375: mol_type = other DNA

SEQ ID NO: 2130 - DNA, 122 bp, synthetic construct
  source 1..122: mol_type = other DNA
gtactgttggatcctttcaccttttagcttggcatgtagctttattgtatgcttgcttgctcatgcttcctaacaattttagccttcgactgatttttcttttttctttttctctttttcag

SEQ ID NO: 2131 - DNA, 543 bp, synthetic construct
  source 1..543: mol_type = other DNA
gttggaccggtacatttgcttctgacacaactgtgttcactagcaacctcaaacagacacaagtaagtagagatatcagctctctccttgttagcagtcagaaaatgcaaacgtggcaactatatctgactacaatgctattcatttgtaacctttttaaaaaaattgctgaacgatatgtttgttcggtatcccgaccacggacggatcttttctgtgtttatggatacttggcaaaaatacgaacggcgactctctcctcctctcttcctttcactcttttttttttcttttgacgtatcttgtttgtaattaactacaaatgggacgttatcctcccaataacaactcgtacgtgcctttattgtgcatgcttgggtggccaggctgggttctggttgtttatgatctttattttttgcttttctagtggggcccaagccagccgtggagtctgagttttctaaggtactcaagaagcactttccgggcgagcgatttaggtctagctacggtggtggtggttctggtggtggtggttct

SEQ ID NO: 2132 - DNA, 238 bp, synthetic construct
  source 1..238: mol_type = other DNA
gttggaccggtacatttgcttctgacacaactgtgttcactagcaacctcaaacagacacaaacgtaccagtaaaacatacgatccgtaaccggatcgagaggtgaagaatacgaccacctactgtggggcccaagccagccgtggagtctgagttttctaaggtactcaagaagcactttccgggcgagcgatttaggtctagctacggtggtggtggttctggtggtggtggttct

SEQ ID NO: 2133 - DNA, 61 bp, synthetic construct
  source 1..61: mol_type = other DNA
gttggaccggtacatttgcttctgacacaactgtgttcactagcaacctcaaacagacaca

SEQ ID NO: 2134 - DNA, 371 bp, synthetic construct
  source 1..371: mol_type = other DNA
agtaagtagagatatcagctctctccttgttagcagtcagaaaatgcaaacgtggcaactatatctgactacaatgctattcatttgtaacctttttaaaaaaattgctgaacgatatgtttgttcggtatcccgaccacggacggatcttttctgtgtttatggatacttggcaaaaatacgaacggcgactctctcctcctctcttcctttcactcttttttttttcttttgacgtatcttgtttgtaattaactacaaatgggacgttatcctcccaataacaactcgtacgtgcctttattgtgcatgcttgggtggccaggctgggttctggttgtttatgatctttattttttgcttttctagtg

SEQ ID NO: 2135 - DNA, 111 bp, synthetic construct
  source 1..111: mol_type = other DNA
gggcccaagccagccgtggagtctgagttttctaaggtactcaagaagcactttccgggcgagcgatttaggtctagctacggtggtggtggttctggtggtggtggttct

SEQ ID NO: 2136 - DNA, 66 bp, synthetic construct
  source 1..66: mol_type = other DNA
aacgtaccagtaaaacatacgatccgtaaccggatcgagaggtgaagaatacgaccacctactgtg

SEQ ID NO: 2137 - DNA, 63 bp, synthetic construct
  source 1..63: mol_type = other DNA
acgtaccagtaaaacatacgatccgtaaccggatcgagaggtgaagaatacgaccacctactg

SEQ ID NO: 2138 - DNA, 681 bp, synthetic construct
  source 1..681: mol_type = other DNA
ataaacatacatgcgcaactgacatacttgttccactcaccgtgttgctacagctataagtaggtaagtagagatatcagctctctccttgttagcagtcagaaaatgcaaacgtggcaactatatctgactacaatgctattcatttgtaacctttttaaaaaaattgctgaacgatatgtttgttcggtatcccgaccacggacggatcttttctgtgtttatggatacttggcaaaaatacgaacggcgactctctcctcctctcttcctttcactcttttttttttcttttgacgtatcttgtttgtaattaactacaaatgggacgttatcctcccaataacaactcgtacgtgcctttattgtgcatgcttgtcttgttattcgttgtatatggaattcctgatttatctttaatctttatctctttttcagtacctgtaaaacataccatccgtaaccggatggagaggtgaagaatacgaccacctacaggtactgctggatcctttcaccttttagcttggcatgtagctttattgtatgcttgcttgctcatgcttcctaacaattttagccttcgactgatttttcttttttctttttctctttttcagtgaaatatatattaaacatatagctgatgcaacacggatagtgtgacagggatacagcaac

SEQ ID NO: 2139 - DNA, 63 bp, synthetic construct
  source 1..63: mol_type = other DNA
ataaacatacatgcgcaactgacatacttgttccactcaccgtgttgctacagctataagtag

SEQ ID NO: 2140 - DNA, 21 bp, synthetic construct
  source 1..21: mol_type = other DNA
accgtgttgctacagctataa

SEQ ID NO: 2141 - DNA, 375 bp, synthetic construct
  source 1..375: mol_type = other DNA
gtaagtagagatatcagctctctccttgttagcagtcagaaaatgcaaacgtggcaactatatctgactacaatgctattcatttgtaacctttttaaaaaaattgctgaacgatatgtttgttcggtatcccgaccacggacggatcttttctgtgtttatggatacttggcaaaaatacgaacggcgactctctcctcctctcttcctttcactcttttttttttcttttgacgtatcttgtttgtaattaactacaaatgggacgttatcctcccaataacaactcgtacgtgcctttattgtgcatgcttgtcttgttattcgttgtatatggaattcctgatttatctttaatctttatctctttttcag

SEQ ID NO: 2142 - DNA, 63 bp, synthetic construct; identical to SEQ ID NO: 2139
  source 1..63: mol_type = other DNA

SEQ ID NO: 2143 - DNA, 61 bp, synthetic construct
  source 1..61: mol_type = other DNA
tgaaatatatattaaacatatagctgatgcaacacggatagtgtgacagggatacagcaac

SEQ ID NO: 2144 - DNA, 26 bp, synthetic construct
  source 1..26: mol_type = other DNA
ctgacccctttctttcccttctgcag

SEQ ID NO: 2145 - DNA, 26 bp, synthetic construct
  source 1..26: mol_type = other DNA
ctgacccctttctatcccttctgcag

SEQ ID NO: 2146 - DNA, 26 bp, synthetic construct
  source 1..26: mol_type = other DNA
ctgacccctttctttaccttctgcag

SEQ ID NO: 2147 - DNA, 26 bp, synthetic construct
  source 1..26: mol_type = other DNA
ctgaccactttctatccctactgcag

SEQ ID NO: 2148 - DNA, 26 bp, synthetic construct
  source 1..26: mol_type = other DNA
ctgacccctttcattccattctgcag

SEQ ID NO: 2149 - DNA, 26 bp, synthetic construct
  source 1..26: mol_type = other DNA
ctgacccctttatttccattcagcag

SEQ ID NO: 2150 - DNA, 25 bp, synthetic construct
  source 1..25: mol_type = other DNA
ctgaccctatatatcgatacagcag

SEQ ID NO: 2151 - DNA, 24 bp, synthetic construct
  source 1..24: mol_type = other DNA
ttcatgccctttctttccttttag

SEQ ID NO: 2152 - DNA, 24 bp, synthetic construct
  source 1..24: mol_type = other DNA
ttcatgccctatcttaccttatag

SEQ ID NO: 2153 - DNA, 24 bp, synthetic construct
  source 1..24: mol_type = other DNA
ttcatgcactttcattcattttag

SEQ ID NO: 2154 - DNA, 24 bp, synthetic construct
  source 1..24: mol_type = other DNA
ttcatgcccattctatacttttag

SEQ ID NO: 2155 - DNA, 24 bp, synthetic construct
  source 1..24: mol_type = other DNA
ttcatgacctatctttcctattag

SEQ ID NO: 2156 - DNA, 32 bp, synthetic construct
  source 1..32: mol_type = other DNA
ttcatgtcccatgtttatttgtgtttttgtag

SEQ ID NO: 2157 - DNA, 33 bp, synthetic construct
  source 1..33: mol_type = other DNA
cctaaccacaccgtgtttttcctcttgcctcag

SEQ ID NO: 2158 - DNA, 27 bp, synthetic construct
  source 1..27: mol_type = other DNA
ttcatttttttgttgttgttgttctag

SEQ ID NO: 2159 - DNA, 30 bp, synthetic construct
  source 1..30: mol_type = other DNA
gtcattgagatgtttgcttttcccccacag

SEQ ID NO: 2160 - DNA, 27 bp, synthetic construct
  source 1..27: mol_type = other DNA
gtgaccttttctccggatcttttccag

SEQ ID NO: 2161 - DNA, 27 bp, synthetic construct
  source 1..27: mol_type = other DNA
ctgacctccactgctcttctcttgcag

SEQ ID NO: 2162 - DNA, 27 bp, synthetic construct
  source 1..27: mol_type = other DNA
ttcatgtgccttgctggacttttacag

SEQ ID NO: 2163 - DNA, 20 bp, synthetic construct
  source 1..20: mol_type = other DNA
cttactttgtattcccatag

SEQ ID NO: 2164 - DNA, 24 bp, synthetic construct
  source 1..24: mol_type = other DNA
ttgattttctatttcctattctag

SEQ ID NO: 2165 - DNA, 28 bp, synthetic construct
  source 1..28: mol_type = other DNA
ttcatatctctttttttaacctcctcag

SEQ ID NO: 2166 - DNA, 40 bp, synthetic construct
  source 1..40: mol_type = other DNA
aaaaatacttcatgtcccatgtttatttgtgtttttgtag

SEQ ID NO: 2167 - DNA, 41 bp, synthetic construct
  source 1..41: mol_type = other DNA
aggaaaaacctaaccacaccgtgtttttcctcttgcctcag

SEQ ID NO: 2168 - DNA, 35 bp, synthetic construct
  source 1..35: mol_type = other DNA
caacaaaattcatttttttgttgttgttgttctag

SEQ ID NO: 2169 - DNA, 38 bp, synthetic construct
  source 1..38: mol_type = other DNA
aaaagcaagtcattgagatgtttgcttttcccccacag

SEQ ID NO: 2170 - DNA, 34 bp, synthetic construct
  source 1..34: mol_type = other DNA
cggagaagtgaccttttctccggatcttttccag

SEQ ID NO: 2171 - DNA, 35 bp, synthetic construct
  source 1..35: mol_type = other DNA
aagagaagctgacctccactgctcttctcttgcag

SEQ ID NO: 2172 - DNA, 36 bp, synthetic construct
  source 1..36: mol_type = other DNA
aaaagtccattcatgtgccttgctggacttttacag

SEQ ID NO: 2173 - DNA, 25 bp, synthetic construct
  source 1..25: mol_type = other DNA
gggaacttactttgtattcccatag

SEQ ID NO: 2174 - DNA, 32 bp, synthetic construct
  source 1..32: mol_type = other DNA
aggaaatattgattttctatttcctattctag

SEQ ID NO: 2175 - DNA, 35 bp, synthetic construct
  source 1..35: mol_type = other DNA
aagggaaagctgacccctttctttcccttctgcag

SEQ ID NO: 2176 - DNA, 36 bp, synthetic construct
  source 1..36: mol_type = other DNA
ttaaaaaattcatatctctttttttaacctcctcag

SEQ ID NO: 2177 - DNA, 38 bp, synthetic construct
  source 1..38: mol_type = other DNA
gaaaggaggaagctgactaccccttcctcctttctaag

SEQ ID NO: 2178 - DNA, 38 bp, synthetic construct
  source 1..38: mol_type = other DNA
gaaagatagggactgacatatttccctatctttctcag

SEQ ID NO: 2179 - DNA, 39 bp, synthetic construct
  source 1..39: mol_type = other DNA
ttgactgaaagaggccatggtttccttctttttccacag

SEQ ID NO: 2180 - DNA, 41 bp, synthetic construct
  source 1..41: mol_type = other DNA
ttgacaatatcatacttatcctgtcccattttattccacag

SEQ ID NO: 2181 - DNA, 53 bp, synthetic construct
  source 1..53: mol_type = other DNA
acaaaacagaaggtgctcgctcacgtcggctttccccttctgttttgttctag

SEQ ID NO: 2182 - DNA, 65 bp, synthetic construct
  source 1..65: mol_type = other DNA
tcgactagaaaaaaaagggattccttgacaatatcatacttatcctgtcccttttttttccacag

SEQ ID NO: 2183 - DNA, 36 bp, synthetic construct
  source 1..36: mol_type = other DNA
nnnnnnnnnnaggaagnnnnnnnnnnawgagtaagw

SEQ ID NO: 2184 - DNA, 35 bp, synthetic construct
  source 1..35: mol_type = other DNA
ywwkwwwmkyaggaagytaktwgttawgagtaagw

SEQ ID NO: 2185 - DNA, 36 bp, synthetic construct
  source 1..36: mol_type = other DNA
ywwkwwwmkyaggaagytaktrwgttawgagtaagw

SEQ ID NO: 2186 - DNA, 45 bp, synthetic construct
  source 1..45: mol_type = other DNA
atrtccactyaaaaaaatctggcgatgggagcagaawgagtaagw

SEQ ID NO: 2187 - DNA, 54 bp, synthetic construct
  source 1..54: mol_type = other DNA
atttaacatttttgagtcaatccaagtaatgcaggaggttcatgattgtgtaga

SEQ ID NO: 2188 - DNA, 51 bp, synthetic construct
  source 1..51: mol_type = other DNA
taaaacataccwdmcgkaamcgkhwggagaggtgaagaatacgaccaccta

SEQ ID NO: 2189 - DNA, 51 bp, synthetic construct
  source 1..51: mol_type = other DNA
taaaacataccaymcgkaamcgkmtggagaggtgaagaatacgaccaccta

SEQ ID NO: 2190 - DNA, 10 bp, synthetic construct
  source 1..10: mol_type = other DNA
awgagtaagw

SEQ ID NO: 2191 - DNA, 10 bp, synthetic construct
  source 1..10: mol_type = other DNA
ataatttttt

SEQ ID NO: 2192 - DNA, 10 bp, synthetic construct
  source 1..10: mol_type = other DNA
cacttttatt

SEQ ID NO: 2193 - DNA, 10 bp, synthetic construct
  source 1..10: mol_type = other DNA
cattataatc

SEQ ID NO: 2194 - DNA, 10 bp, synthetic construct
  source 1..10: mol_type = other DNA
ccataagttt

SEQ ID NO: 2195 - DNA, 10 bp, synthetic construct
  source 1..10: mol_type = other DNA
tactatttat

SEQ ID NO: 2196 - DNA, 10 bp, synthetic construct
  source 1..10: mol_type = other DNA
tcatatctat

SEQ ID NO: 2197 - DNA, 10 bp, synthetic construct
  source 1..10: mol_type = other DNA
ttagtatcgt

SEQ ID NO: 2198 - DNA, 10 bp, synthetic construct
  source 1..10: mol_type = other DNA
gttacgcttt

SEQ ID NO: 2199 - DNA, 10 bp, synthetic construct
  source 1..10: mol_type = other DNA
ttgtgttgtt

SEQ ID NO: 2200 - DNA, 10 bp, synthetic construct
  source 1..10: mol_type = other DNA
ttagtgtgtt

SEQ ID NO: 2201 - DNA, 10 bp, synthetic construct
  source 1..10: mol_type = other DNA
tgatgtatat

SEQ ID NO: 2202 - DNA, 10 bp, synthetic construct
  source 1..10: mol_type = other DNA
tttatctatc

SEQ ID NO: 2203 - DNA, 10 bp, synthetic construct
  source 1..10: mol_type = other DNA
ttttttacag

SEQ ID NO: 2204 - DNA, 10 bp, synthetic construct
  source 1..10: mol_type = other DNA
ctattagtta

SEQ ID NO: 2205 - DNA, 35 bp, synthetic construct
  source 1..35: mol_type = other DNA
nnnnnnnnnnaggaagnnnnnnnnnawgagtaagw

SEQ ID NO: 2206 - DNA, 36 bp, synthetic construct; identical to SEQ ID NO: 2185
  source 1..36: mol_type = other DNA

SEQ ID NO: 2207 - DNA, 36 bp, synthetic construct
  source 1..36: mol_type = other DNA
cattataatcaggaagttagtgtgttaagagtaagt

SEQ ID NO: 2208 - DNA, 35 bp, synthetic construct
  source 1..35: mol_type = other DNA
ttagtatcgtaggaagctattagttaatggtaagt

SEQ ID NO: 2209 - DNA, 45 bp, synthetic construct
  source 1..45: mol_type = other DNA
atgtccacttaaaaaaatctggcgatgggagcagaaagagtaagt

SEQ ID NO: 2210 - DNA, 45 bp, synthetic construct
  source 1..45: mol_type = other DNA
atgtccactcaaaaaaatctggcgatgggagcagaaagagtaagt

SEQ ID NO: 2211 - DNA, 45 bp, synthetic construct
  source 1..45: mol_type = other DNA
atatccacttaaaaaaatctggcgatgggagcagaaagagtaagt

SEQ ID NO: 2212 - DNA, 51 bp, synthetic construct
  source 1..51: mol_type = other DNA
taaaacatacctaccgtaaccggtaggagaggtgaagaatacgaccaccta

SEQ ID NO: 2213 - DNA, 18 bp, synthetic construct
  source 1..18: mol_type = other DNA
tcctcatttcctctcctt

SEQ ID NO: 2214 - DNA, 18 bp, synthetic construct
  source 1..18: mol_type = other DNA
tttccaacttatttccct

SEQ ID NO: 2215 - DNA, 18 bp, synthetic construct
  source 1..18: mol_type = other DNA
cttactttgtattcccat

SEQ ID NO: 2216 - DNA, 18 bp, synthetic construct
  source 1..18: mol_type = other DNA
aatctttatctctatttc

SEQ ID NO: 2217 - DNA, 18 bp, synthetic construct
  source 1..18: mol_type = other DNA
tgccctatcttaccttat

SEQ ID NO: 2218 - DNA, 18 bp, synthetic construct
  source 1..18: mol_type = other DNA
tgcactttcattcatttt

SEQ ID NO: 2219 - DNA, 18 bp, synthetic construct
  source 1..18: mol_type = other DNA
ccacctttttttattttc

SEQ ID NO: 2220 - DNA, 18 bp, synthetic construct
  source 1..18: mol_type = other DNA
cccccatttgtcttcccc

SEQ ID NO: 2221-2231 - skipped (11 entries)

SEQ ID NO: 2232 - DNA, 360 bp, synthetic construct
  source 1..360: mol_type = other DNA
gtgagtagagatatcagctctctccttgttagcagtcagaaaatgcaaacgtggcaactatatctgactacaatgctattcatttgtaacctttttaaaaaaattgctgaacgatatgtttgttcggtatcccgaccacggacggatcttttctgtgtttatggatacttggcaaaaatacgaacggcgactctctcctcctctcttcctttcactcttttttttttcttttgacgtatcttgtttgtaattaactacaaatgggacgttatcctcccaataacaactcgtacgtgcctttattgtgcatgcttgtcttgttattcgttgtatatgttcatgcactttcattcattttag

SEQ ID NO: 2233 - DNA, 122 bp, synthetic construct
  source 1..122: mol_type = other DNA
gtactgatggatcctttcaccttttagcttggcatgtagctttattgtatgcttgcttgctcatgcttcctaacaattttagccttcgactgatttttcttttttctttttctctttttcag

SEQ ID NO: 2234-2235 - skipped (2 entries)

SEQ ID NO: 2236 - DNA, 512 bp, synthetic construct
  source 1..512: mol_type = other DNA
actagcaacctcaaacagacacaagtaagtagagatatcagctctctccttgttagcagtcagaaaatgcaaacgtggcaactatatctgactacaatgctattcatttgtaacctttttaaaacccaataacaactcgtacgtgcctttattgtgcatgcttgtcttgttattcgttgtatatggaattcctgatttatctttnnnnnnnnnnnnnnnnnnagnnnnnnnnntaaaacatacctaccgtaaccggtaggagaggtgaagaatacgaccacctannnnnnngtnnctcatgggttcgcccatgagtttttggatcctttcaccttttgcttggcatgtagctttattgtatgcttgcttgctcatgcttcctaactgaattttaaccttcgactgatttttctttnnnnnnnnnnnnnnnnnnnntggggcccaagaaaaaacgcaaggtggaagatcctaagaaaaagcggaaagtgagcctgggcagcggctccaccggt

SEQ ID NO: 2237 - DNA, 20 bp, synthetic construct
  source 1..20: mol_type = other DNA
tttctttttctctttttcag

SEQ ID NO: 2238 - DNA, 20 bp, synthetic construct
  source 1..20: mol_type = other DNA
tttcttattctccctttcag

SEQ ID NO: 2239 - DNA, 20 bp, synthetic construct
  source 1..20: mol_type = other DNA
tttcttcttctacctttcag

SEQ ID NO: 2240 - DNA, 274 bp, synthetic construct
  source 1..274: mol_type = other DNA
acatttgcttctgacacaactgtgttcactagcaacctcaaacagannnnnnnnnnaggaagnnnnnnnnnnawgagtaagwcataattttgttgaggtttaactcgaatacttaacgtggtacgaatacttaacgtggtacgagaggcagcctaacgaccacacagcattcacgccggctaatttttgtatttttagtagagacggggtttcaccacggtggccaggcgggttcggttgtttacgatctttattttttggtgatctagtgggg

SEQ ID NO: 2241 - DNA, 36 bp, synthetic construct
  source 1..36: mol_type = other DNA
ataattttttaggaaggttacgctttatgagtaagt

SEQ ID NO: 2242 - DNA, 36 bp, synthetic construct
  source 1..36: mol_type = other DNA
cacttttattaggaagttgtgttgttaagagtaagt

SEQ ID NO: 2243 - DNA, 36 bp, synthetic construct
  source 1..36: mol_type = other DNA
ccataagtttaggaagtgatgtatatatgagtaagt

SEQ ID NO: 2244 - DNA, 36 bp, synthetic construct
  source 1..36: mol_type = other DNA
tactatttataggaagtttatctatcatgagtaagt

SEQ ID NO: 2245 - DNA, 36 bp, synthetic construct
  source 1..36: mol_type = other DNA
tcatatctataggaagttttttacagaagagtaagt

SEQ ID NO: 2246 - DNA, 36 bp, synthetic construct
  source 1..36: mol_type = other DNA
ttagtatcgtaggaagctattagttaatgagtaagt

SEQ ID NO: 2247 - DNA, 2273 bp, synthetic construct
  source 1..2273: mol_type = other DNA
atgagttcgccaaatatatggagcacaggaagctcagtctactcgactcctgtattttcacagaaaatgacggtgtggattctgctcctgctgtcgctctaccctggcttcactagccagaaatctgatgatgactatgaagattatgcttctaacaaaacatgggtcttgactccaaaagttcctgagggtgatgtcactgtcatcttaaacaacctgctggaaggatatgacaataaacttcggcctgatataggagtgaagccaacgttaattcacacagacatgtatgtgaatagcattggtccagtgaacgctatcaatatggaatacactattgatatattttttgcgcaaacgtggtatgacagacgtttgaaatttaacagcaccattaaagtcctccgattgaacagcaacatggtggggaaaatctggattccagacactttcttcagaaattccaaaaaagctgatgcacactggatcaccacccccaacaggatgctgagaatttggaatgatggtcgagtgctctacaccctaaggttgacaattgatgctgagtgccaattacaattgcacaactttccaatggatgaacactcctgccccttggagttctccagttatggctatccacgtgaagaaattgtttatcaatggaagcgaagttctgttgaagtgggcgacacaagatcctggaggctttatcaattctcatttgttggtctaagaaataccaccgaagtagtgaagacaacttccggagattatgtggtcatgtctgtctactttgatctgagcagaagaatgggatactttaccatccagacctatatcccctgcacactcattgtcgtcctatcctgggtgtctttctggatcaataaggatgctgttccagccagaacatctttaggtatcaccactgtcctgacaatgaccaccctcagcaccattgcccggaaatcgctccccaaggtctcctatgtcacagcgatggatctctttgtatctgtttgtttcatctttgtcttctctgctctggtggagtatggcaccttgcattattttgtcagcaaccggaaaccaagcaaggacaaagataaaaagaagaaaaacccggtaagtgcagagctcccgggcgggcgctgggcctcgggctaccccgtccggtcaatgatgcgggctgtctgactacaatgctattcatttgtaacctttttaaaacccaatgctcatgcttcctaacatggtttcccatctggacatggactgccgacacgcgcgggttcgcatcggatacgtcatgggggccatgcttaagcgggacgctgaccaacatgctgtcttttccccacctcagcttcttcggatgttttccttcaaggcccctaccattgatatccgcccaagatcagcaaccattcaaatgaataatgctacacaccttcaagagagagatgaagagtacggctatgagtgtctggacggcaaggactgtgccagttttttctgctgttttgaagattgtcgaacaggagcttggagacatgggaggatacatatccgcattgccaaaatggactcctatgctcggatcttcttccccactgccttctgcctgtttaatctggtctattgggtctcctacctctacctgtccggaggctcctacccatacgatgttccagattacgcttgatagaattcgtgttcactagcaacctcaaacagacattataatcaggaagttagtgtgttaagagtaagtcataattttgttgaggtttaactcgaatacttaacgtggtacgaatacttaacgtggtacgagaggcagcctaacgaccacacagcattcacgccggctaatttttgtatttttagtagagacggggtttcaccacggtggccaggcgggttcggttgtttacgatctttattttttgttgttctaggcccccaccatcgatattagacctagaagcgccaccattcagatgaacaacgccacccacctgcaagagagagacgaggagtacggctacgagtgcctggacggcaaggactgcgctagcttcttctgctgcttcgaggactgcagaaccggcgcctggagacacggcagaatccacatcagaatcgccaagatggacagctacgctagaatcttcttccccaccgccttctgcctgttcaacctggtgtactgggtgagctacctgtacctgtctggtggctccgattacaaggatgacgatgacaag

SEQ ID NO: 2248 - DNA, 2272 bp, synthetic construct
  source 1..2272: mol_type = other DNA
atgagttcgccaaatatatggagcacaggaagctcagtctactcgactcctgtattttcacagaaaatgacggtgtggattctgctcctgctgtcgctctaccctggcttcactagccagaaatctgatgatgactatgaagattatgcttctaacaaaacatgggtcttgactccaaaagttcctgagggtgatgtcactgtcatcttaaacaacctgctggaaggatatgacaataaacttcggcctgatataggagtgaagccaacgttaattcacacagacatgtatgtgaatagcattggtccagtgaacgctatcaatatggaatacactattgatatattttttgcgcaaacgtggtatgacagacgtttgaaatttaacagcaccattaaagtcctccgattgaacagcaacatggtggggaaaatctggattccagacactttcttcagaaattccaaaaaagctgatgcacactggatcaccacccccaacaggatgctgagaatttggaatgatggtcgagtgctctacaccctaaggttgacaattgatgctgagtgccaattacaattgcacaactttccaatggatgaacactcctgccccttggagttctccagttatggctatccacgtgaagaaattgtttatcaatggaagcgaagttctgttgaagtgggcgacacaagatcctggaggctttatcaattctcatttgttggtctaagaaataccaccgaagtagtgaagacaacttccggagattatgtggtcatgtctgtctactttgatctgagcagaagaatgggatactttaccatccagacctatatcccctgcacactcattgtcgtcctatcctgggtgtctttctggatcaataaggatgctgttccagccagaacatctttaggtatcaccactgtcctgacaatgaccaccctcagcaccattgcccggaaatcgctccccaaggtctcctatgtcacagcgatggatctctttgtatctgtttgtttcatctttgtcttctctgctctggtggagtatggcaccttgcattattttgtcagcaaccggaaaccaagcaaggacaaagataaaaagaagaaaaacccggtaagtgcagagctcccgggcgggcgctgggcctcgggctaccccgtccggtcaatgatgcgggctgtctgactacaatgctattcatttgtaacctttttaaaacccaatgctcatgcttcctaacatggtttcccatctggacatggactgccgacacgcgcgggttcgcatcggatacgtcatgggggccatgcttaagcgggacgctgaccaacatgctgtcttttccccacctcagcttcttcggatgttttccttcaaggcccctaccattgatatccgcccaagatcagcaaccattcaaatgaataatgctacacaccttcaagagagagatgaagagtacggctatgagtgtctggacggcaaggactgtgccagttttttctgctgttttgaagattgtcgaacaggagcttggagacatgggaggatacatatccgcattgccaaaatggactcctatgctcggatcttcttccccactgccttctgcctgtttaatctggtctattgggtctcctacctctacctgtccggaggctcctacccatacgatgttccagattacgcttgatagaattcgtgttcactagcaacctcaaacagattagtatcgtaggaagctattagttaatggtaagtcataattttgttgaggtttaactcgaatacttaacgtggtacgaatacttaacgtggtacgagaggcagcctaacgaccacacagcattcacgccggctaatttttgtatttttagtagagacggggtttcaccacggtggccaggcgggttcggttgtttacgatctttattttttgttgttctaggcccccaccatcgatattagacctagaagcgccaccattcagatgaacaacgccacccacctgcaagagagagacgaggagtacggctacgagtgcctggacggcaaggactgcgctagcttcttctgctgcttcgaggactgcagaaccggcgcctggagacacggcagaatccacatcagaatcgccaagatggacagctacgctagaatcttcttccccaccgccttctgcctgttcaacctggtgtactgggtgagctacctgtacctgtctggtggctccgattacaaggatgacgatgacaag

SEQ ID NO: 2249 - DNA, 1871 bp, synthetic construct
  source 1..1871: mol_type = other DNA
atggagctgagggtcgggaacaggtaccggctgggccggaagatcggcagcggctccttcggagacatctatctcggtacggacattgctgcaggagaagaggttgccatcaagcttgaatgtgtcaaaaccaaacaccctcagctccacattgagagcaaaatctacaagatgatgcagggaggagtgggcatccccaccatcagatggtgcggggcagagggggactacaacgtcatggtgatggagctgctggggccaagcctggaggacctcttcaacttctgctccaggaaattcagcctcaaaaccgtcctgctgcttgctgaccaaatgatcagtcgcatcgaatacattcattcaaagaacttcatccaccgggatgtgaagccagacaacttcctcatgggcctggggaagaagggcaacctggtgtacatcatcgacttcgggctggccaagaagtaccgggatgcacgcacccaccagcacatcccctatcgtgagaacaagaacctcacggggacggcgcggtacgcctccatcaacacgcaccttggaattgaacaatcccgaagagatgacttggagtctctgggctacgtgctaatgtacttcaacctgggctctctcccctggcaggggctgaaggctgccaccaagagacagaaatacgaaaggattagcgagaagaaaatgtccacccccatcgaagtgttgtgtaaaggctacccttccgaatttgccacatacctgaatttctgccgttccttgcgttttgacgacaagcctgactactcgtacctgcggcagcttttccggaatctgttccatcgccagggcttctcatatgactacgtgttcgactggaacatgctcaaatttggtgccagccgggccgccgatgacgccgagcgggagcgcagggaccgagaggagcggctgagacactcgcggaacccggctacccgcggcctcccttccacagcctccggccgcctgcgggggacgcaggaagtggctccccccacacccctcacccctacctcacacacggctaacacctccccccggcccgtctccggcatggagagagagcggaaagtgagtatgcggctgcaccgcggggcccccgtcaacatctcctcgtccgacctcacaggccgacaagatacctctcgcatgtccacctcacaggtaggtgcagagctcccgggcgggcgctgggcctcgggctaccccgtccggtcaatgatgcgggctgtctgactacaatgctattcatttgtaacctttttaaaacccaatgctcatgcttcctaacatggtttcccatctggacatggactgccgacacgcgcgggttcgcatcggatacgtcatgggggccatgcttaagcgggacgctgaccaacatgctgtcttttccccacctcagaatagcattcctttcgaacaccacggcaagtccggaggctcctacccatacgacgtaccagattacgcttgatagaattcatgtccacttaaaaaaatctggcgatgggagcagaaagagtaagtggcagtgaggaggttacctagctcaggccatgcagattacaagttttaatttttcctctcctcaaacctgcctcctaagtcaggcaagctaagtgctagccgcaccgtctttatggatacttggcaaaaatacgaacggcgactctctcactgtctggtatctgcctggccggctcccccatgccccatgctgaccttctcctgtgctttggctccgacagattcctggtcgggtggcttccagtggtcttcagtctgtcgtgcaccgatctggtggctccgattacaaggatgacgatgacaagtga

SEQ ID NO: 2250 - DNA, 1871 bp, synthetic construct
  source 1..1871: mol_type = other DNA
atggagctgagggtcgggaacaggtaccggctgggccggaagatcggcagcggctccttcggagacatctatctcggtacggacattgctgcaggagaagaggttgccatcaagcttgaatgtgtcaaaaccaaacaccctcagctccacattgagagcaaaatctacaagatgatgcagggaggagtgggcatccccaccatcagatggtgcggggcagagggggactacaacgtcatggtgatggagctgctggggccaagcctggaggacctcttcaacttctgctccaggaaattcagcctcaaaaccgtcctgctgcttgctgaccaaatgatcagtcgcatcgaatacattcattcaaagaacttcatccaccgggatgtgaagccagacaacttcctcatgggcctggggaagaagggcaacctggtgtacatcatcgacttcgggctggccaagaagtaccgggatgcacgcacccaccagcacatcccctatcgtgagaacaagaacctcacggggacggcgcggtacgcctccatcaacacgcaccttggaattgaacaatcccgaagagatgacttggagtctctgggctacgtgctaatgtacttcaacctgggctctctcccctggcaggggctgaaggctgccaccaagagacagaaatacgaaaggattagcgagaagaaaatgtccacccccatcgaagtgttgtgtaaaggctacccttccgaatttgccacatacctgaatttctgccgttccttgcgttttgacgacaagcctgactactcgtacctgcggcagcttttccggaatctgttccatcgccagggcttctcatatgactacgtgttcgactggaacatgctcaaatttggtgccagccgggccgccgatgacgccgagcgggagcgcagggaccgagaggagcggctgagacactcgcggaacccggctacccgcggcctcccttccacagcctccggccgcctgcgggggacgcaggaagtggctccccccacacccctcacccctacctcacacacggctaacacctccccccggcccgtctccggcatggagagagagcggaaagtgagtatgcggctgcaccgcggggcccccgtcaacatctcctcgtccgacctcacaggccgacaagatacctctcgcatgtccacctcacaggtaggtgcagagctcccgggcgggcgctgggcctcgggctaccccgtccggtcaatgatgcgggctgtctgactacaatgctattcatttgtaacctttttaaaacccaatgctcatgcttcctaacatggtttcccatctggacatggactgccgacacgcgcgggttcgcatcggatacgtcatgggggccatgcttaagcgggacgctgaccaacatgctgtcttttccccacctcagaatagcattcctttcgaacaccacggcaagtccggaggctcctacccatacgacgtaccagattacgcttgatagaattcatgtccacttaaaaaaatctggcgatgggagcagaaagagtaagtggccgtgaggaggttacctagctcaggccatgcagattacaagttttaatttttcctctcctcaaacctgcctcctaagtcaggcaagctaagtgctagccgcaccgtctttatggatacttggcaaaaatacgaacggcgactctctcactgtctggtatctgcctggccggctcccccatgccccatgctgaccttctcctgtgctttggctccgacagattcctggtcgggtggcttccagtggtcttcagtctgtcgtgcaccgatctggtggctccgattacaaggatgacgatgacaagtga

SEQ ID NO: 2251 - DNA, 666 bp, synthetic construct
  source 1..666: mol_type = other DNA
agtggagtttgtaagacattggagacattattcgactagaacacaaagggtaagtcaatttgcagtttggataaataaatggtacgggcaccaaggggagggagttattttaagaagtaaacagaagttagattttgatgaggctctggtcaatggagcaaggccacagtgcgagaatgggagaagcattttatgaaggtgatgaaattgcaggccagcctttgcctgccttctgtccagataaaagtgagagttgttatataaaactaaataaaagctaaattaaacccctctcatcctccacagatcaccatgtccactcaaaaaaatctggcgatgggagcagaaagagtaagtggccgtgaggaggttacctagctcaggccatgcagattacaagttttaatttttcctctcctcaaacctgcctcctaagtcaggcaagctaagtgcttcaaagctactaaatgtgtgaaagtcgccccccacctccctgccagcacctaaagttagcccctttcttggcatgccgtccagtgctcctaccatctgtctctcctggtttgggctcatctcttcttaatgacacttctcttttctaacttctagaacttcccggaacttgcacagtcactatcatggggacccaagaaaaaacgcaaggtg

SEQ ID NO: 2252 - DNA, 660 bp, synthetic construct
  source 1..660: mol_type = other DNA
agtggagtttgtaagacattggagacattattcgactagaacacaaagggtaagtcaatttgcagtttggataaataaatggtacgggcaccaaggggagggagttattttaagaagtaaacagaagttagattttgatgaggctctggtcaatggagcaaggccacagtgcgagaatgggagaagcattttatgaaggtgatgaaattgcaggccagcctttgcctgccttctgtccagataaaagtgagagttgttatataaaactaaataaaagctaaattaaacccctctcatcctccacagatgtccactcaaaaaaatctggcgatgggagcagaaagagtaagtggccgtgaggaggttacctagctcaggccatgcagattacaagttttaatttttcctctcctcaaacctgcctcctaagtcaggcaagctaagtgcttcaaagctactaaatgtgtgaaagtcgccccccacctccctgccagcacctaaagttagcccctttcttggcatgccgtccagtgctcctaccatctgtctctcctggtttgggctcatctcttcttaatgacacttctcttttctaacttctagaacttcccggaacttgcacagtcactatcatggggacccaagaaaaaacgcaaggtg

SEQ ID NO: 2253 - DNA, 660 bp, synthetic construct
  source 1..660: mol_type = other DNA
agtggagtttgtaagacattggagacattattcgactagaacacaaagggtaagtcaatttgcagtttggataaataaatggtacgggcaccaaggggagggagttattttaagaagtaaacagaagttagattttgatgaggctctggtcaatggagcaaggccacagtgcgagaatgggagaagcattttatgaaggtgatgaaattgcaggccagcctttgcctgccttctgtccagataaaagtgagagttgttatataaaactaaataaaagctaaattaaacccctctcatcctccacagatatccacttaaaaaaatctggcgatgggagcagaaagagtaagtggccgtgaggaggttacctagctcaggccatgcagattacaagttttaatttttcctctcctcaaacctgcctcctaagtcaggcaagctaagtgcttcaaagctactaaatgtgtgaaagtcgccccccacctccctgccagcacctaaagttagcccctttcttggcatgccgtccagtgctcctaccatctgtctctcctggtttgggctcatctcttcttaatgacacttctcttttctaacttctagaacttcccggaacttgcacagtcactatcatggggacccaagaaaaaacgcaaggtg

SEQ ID NO: 2254 - DNA, 489 bp, synthetic construct
  source 1..489: mol_type = other DNA
tttctgtacaacttaaccttgcagagagccactggcatcagctttgccattcttggaaacttttctggtaagttctctcgttaccatcttttgaaattttaagtgaattaatacatatcttgcttagtctcttgtgcaggaaatgttttccatttatgacaaaacaggaattgtgtgaaatttcaaatattggattaggaaatacaaagttactgaaagtgaggtactaatgtttataaaataaaaactttttcttgccatttgcagatttaacatttttgagtcaatccaagtaatgcaggaggttcatgattgtgtagagtaagtcgactcgttggatcccagcgatatcaaaagctatgtgccgctactgacccctttctttcccttctgcagccactcaccgtgttgctacagctataagtagtgaaatatatattaaacatatagctgatgcaacacggatagtgttctacagatacagcaact

SEQ ID NO: 2255 - DNA, 612 bp, synthetic construct
  source 1..612: mol_type = other DNA
tttctgtacaacttaaccttgcagagagccactggcatcagctttgccattcttggaaacttttctggtaagttctctcgttaccatcttttgaaattttaagtgaattaatacatatcttgcttagtctcttgtgcaggaaatgttttccatttatgacaaaacaggaattgtgtgaaatttcaaatattggattaggaaatacaaagttactgaaagtgaggtactaatgtttataaaataaaaactttttcttgccatttgcagatttaacatttttgagtcaatccaagtaatgcaggaggttcatgattgtgtagaaagacataattttgttgaggtttaactctgaatacttaatgtggtactgaatacttaatgtggtactgagaggcagcctaactgaccacacagcattcacgcctggctaatttttgtatttttagtagagacggggtttcaccatggtggccaggctgggttctggttgtttatgatctttattttttggtgatctagccactcaccgtgttgctacagctataagtagtgaaatatatattaaacatatagctgatgcaacacggatagtgttctacagatacagcaact

SEQ ID NO: 2256 - DNA, 614 bp, synthetic construct
  source 1..614: mol_type = other DNA
tttctgtacaacttaaccttgcagagagccactggcatcagctttgccattcttggaaacttttctggtaagttctctcgttaccatcttttgaaattttaagtgaattaatacatatcttgcttagtctcttgtgcaggaaatgttttccatttatgacaaaacaggaattgtgtgaaatttcaaatattggattaggaaatacaaagttactgaaagtgaggtactaatgtttataaaataaaaactttttcttgccatttgcagatttaacatttttgagtcaatccaagtaatgcaggaggttcatgattgtgtagagtaagacataattttgttgaggtttaactctgaatacttaatgtggtactgaatacttaatgtggtactgagaggcagcctaactgaccacacagcattcacgcctggctaatttttgtatttttagtagagacggggtttcaccatggtggccaggctgggttctggttgtttatgatctttattttttggtgatctagccactcaccgtgttgctacagctataagtagtgaaatatatattaaacatatagctgatgcaacacggatagtgttctacagatacagcaact

SEQ ID NO: 2257 - DNA, 91 bp, synthetic construct
  source 1..91: mol_type = other DNA
attcaccgtgttgctacagctataagtagtgaaatatatattaaacatatagctgatgcaacacggatagttatacacacatacagcaact

SEQ ID NO: 2258 - DNA, 125 bp, synthetic construct
  source 1..125: mol_type = other DNA
ataaacatacatgcgcaactgacatacttgttccactcaccgtgttgctacagctataagtagtgaaatatatattaaacatatagctgatgcaacacggatagtgtgacagggatacagcaact

SEQ ID NO: 2259 - DNA, 93 bp, synthetic construct
  source 1..93: mol_type = other DNA
ctattcaccgtgttgctacagctataagtagtgaaatatatattaaacatatagctgatgcaacacggatagtgttctacagatacagcaact

SEQ ID NO: 2260 - DNA, 147 bp, synthetic construct
  source 1..147: mol_type = other DNA
atttaacatttttgagtcaatccaagtaatgcaggaggttcatgattgtgtagactattcaccgtgttgctacagctataagtagtgaaatatatattaaacatatagctgatgcaacacggatagtgttctacagatacagcaact

SEQ ID NO: 2261 - skipped

SEQ ID NO: 2262 - DNA, 39 bp, synthetic construct
  source 1..39: mol_type = other DNA
gaattcctgatttatctttaatctttatctctatttcag

SEQ ID NO: 2263 - DNA, 30 bp, synthetic construct
  source 1..30: mol_type = other DNA
gaattcttcatgcactttcattcattttag

SEQ ID NO: 2264 - DNA, 13 bp, synthetic construct
  source 1..13: mol_type = other DNA
gtaagttggatcc

SEQ ID NO: 2265 - DNA, 13 bp, synthetic construct
  source 1..13: mol_type = other DNA
gtacgttggatcc

SEQ ID NO: 2266 - DNA, 13 bp, synthetic construct
  source 1..13: mol_type = other DNA
gtgagttggatcc

SEQ ID NO: 2267 - DNA, 13 bp, synthetic construct
  source 1..13: mol_type = other DNA
gtactatggatcc

SEQ ID NO: 2268 - DNA, 14 bp, synthetic construct
  source 1..14: mol_type = other DNA
gtactgctggatcc

SEQ ID NO: 2269 - DNA, 14 bp, synthetic construct
  source 1..14: mol_type = other DNA
gtactggtggatcc

SEQ ID NO: 2270 - DNA, 14 bp, synthetic construct
  source 1..14: mol_type = other DNA
gtactgatggatcc

SEQ ID NO: 2271 - DNA, 14 bp, synthetic construct
  source 1..14: mol_type = other DNA
gtactgttggatcc

SEQ ID NO: 2272 - DNA, 11 bp, synthetic construct
  source 1..11: mol_type = other DNA
cacaagtaagt

SEQ ID NO: 2273 - DNA, 18 bp, synthetic construct
  source 1..18: mol_type = other DNA
agctataagtaggtaagt

SEQ ID NO: 2274 - DNA, 17 bp, synthetic construct
  source 1..17: mol_type = other DNA
agtgaaatatatattaa

SEQ ID NO: 2275 - DNA, 30 bp, synthetic construct
  source 1..30: mol_type = other DNA
nnnnnnnnnnaggaagnnnnnnnnnnawga

SEQ ID NO: 2276 - RNA, 138 nt, synthetic construct
  source 1..138: mol_type = other RNA
cttgttccactcaccgtgttgctacagctataagtagtaaaacataccatccgtaaccggatggagaggtgaagaatacgaccacctatgaaatatatattaaacatatagctgatgcaacacggatagtgtgacagg

SEQ ID NO: 2277 - RNA, 87 nt, synthetic construct
  source 1..87: mol_type = other RNA
cttgttccactcaccgtgttgctacagctataagtagtgaaatatatattaaacatatagctgatgcaacacggatagtgtgacagg

SEQ ID NO: 2278 - RNA, 87 nt, synthetic construct
  source 1..87: mol_type = other RNA
nnnnnnccactcaccgtgttgctacagctataagtagtgaaatatatattaaacatatagctgatgcaacacggatagtgtnnnnnn

SEQ ID NO: 2279 - RNA, 77 nt, synthetic construct
  source 1..77: mol_type = other RNA
ctattcaccgtgttgctacagctataagtagtgaaatatatattaaacatatatagctgatgcaacacggatagtgt

SEQ ID NO: 2280 - RNA, 87 nt, synthetic construct
  source 1..87: mol_type = other RNA
nnnnnnctattcaccgtgttgctacagctataagtagtgaaatatatattaaacatatagctgatgcaacacggatagtgtnnnnnn

SEQ ID NO: 2281 - DNA, 124 bp, synthetic construct
  source 1..124: mol_type = other DNA
ataaacatacatgcgcaactgacatacttgttccactcaccgtgttgctacagctataagtagtgaaatatatattaaacatatagctgatgcaacacggatagtgtgacagggatacagcaac